United States Patent Application Publication US 2026/0285927 A1, published September 24, 2026 (application 19/555,705).

The application's sequence listing, which the Patent Office published only in electronic form, follows.

SEQUENCE LISTING (6884 sequences)

SEQ ID NO: 1 - protein, 19 aa, synthetic construct
  REGION 1..19: note = Synthetic
KRFIEKLRTFLRKLSRGAK

SEQ ID NO: 2 - protein, 25 aa, synthetic construct
  REGION 1..25: note = Synthetic
LCFLKRLLQEIKTCWNKILMGTKEH

SEQ ID NO: 3 - protein, 23 aa, synthetic construct
  REGION 1..23: note = Synthetic
EVAQFVKDLLLHLKKLFREGRFN

SEQ ID NO: 4 - protein, 29 aa, synthetic construct
  REGION 1..29: note = Synthetic
KEFLERFKSLLQKMIHQHLSSRTHGSEDS

SEQ ID NO: 5 - protein, 35 aa, synthetic construct
  REGION 1..35: note = Synthetic
KAISELYNVITELSKSNSKMRKRRQNLFRGWKASK

SEQ ID NO: 6 - protein, 35 aa, synthetic construct
  REGION 1..35: note = Synthetic
AIHELIQVMAELSPAAKTGKRKRSQMLFRGRRASQ

SEQ ID NO: 7 - protein, 20 aa, synthetic construct
  REGION 1..20: note = Synthetic
TQAWTNFKKWFKKWFKKTFS

SEQ ID NO: 8 - protein, 27 aa, synthetic construct
  REGION 1..27: note = Synthetic
LFQKIKRWWKRIFEHEASRSARRLRAV

SEQ ID NO: 9 - protein, 20 aa, synthetic construct
  REGION 1..20: note = Synthetic
KEVIKKFTKAMEKMKKNGRA

SEQ ID NO: 10 - protein, 27 aa, synthetic construct
  REGION 1..27: note = Synthetic
LWQRFLRWWNRLFHVSSNRLLREGGKK

SEQ ID NO: 11 - protein, 17 aa, synthetic construct
  REGION 1..17: note = Synthetic
YGGFLRRIRPKLKWDNQ

SEQ ID NO: 12 - protein, 29 aa, synthetic construct
  REGION 1..29: note = Synthetic
KEFLERFKSLLQKMIHQHLSSRTHGSEDS

SEQ ID NO: 13 - protein, 32 aa, synthetic construct
  REGION 1..32: note = Synthetic
YGGFLRRIRPKLKWDNQKRYGGFLRRQFKVVT

SEQ ID NO: 14 - protein, 60 aa, synthetic construct
  REGION 1..60: note = Synthetic
RFLHGYHRFMHSVGRVFSKWGESPNRSRRHSPHQALRKGVRRTRPSRKGKRLMTRGQLPR

SEQ ID NO: 15 - protein, 21 aa, synthetic construct
  REGION 1..21: note = Synthetic
CPTAQLIATLKNGRKICLDLQ

SEQ ID NO: 16 - protein, 22 aa, synthetic construct
  REGION 1..22: note = Synthetic
CPTAQLIATLKNGRKICLDLQP

SEQ ID NO: 17 - protein, 23 aa, synthetic construct
  REGION 1..23: note = Synthetic
CPTAQLIATLKNGRKICLDLQAP

SEQ ID NO: 18 - protein, 22 aa, synthetic construct
  REGION 1..22: note = Synthetic
CPTAQLIATLKNGRKICLDLQA

SEQ ID NO: 19 - protein, 14 aa, synthetic construct
  REGION 1..14: note = Synthetic
RIKKFLKRCCKKIK

SEQ ID NO: 20 - protein, 14 aa, synthetic construct
  REGION 1..14: note = Synthetic
RIKKFLKRCCKKIK

SEQ ID NO: 21 - protein, 14 aa, synthetic construct
  REGION 1..14: note = Synthetic
RIKKFLKRCCKKIK

SEQ ID NO: 22 - protein, 22 aa, synthetic construct
  REGION 1..22: note = Synthetic
FLKKLLQKIKTCWNKILRGIKE

SEQ ID NO: 23 - protein, 16 aa, synthetic construct
  REGION 1..16: note = Synthetic
KRVKRFCKKACRKASQ

SEQ ID NO: 24 - protein, 16 aa, synthetic construct
  REGION 1..16: note = Synthetic
KRVKRFCKKACRKASQ

SEQ ID NO: 25 - protein, 18 aa, synthetic construct
  REGION 1..18: note = Synthetic
KNVKRFIEKLRTFLRKLS

SEQ ID NO: 26 - protein, 12 aa, synthetic construct
  REGION 1..12: note = Synthetic
LVRKIIKYCRKL

SEQ ID NO: 27 - protein, 12 aa, synthetic construct
  REGION 1..12: note = Synthetic
LVRKIIKYCRKL

SEQ ID NO: 28 - protein, 14 aa, synthetic construct
  REGION 1..14: note = Synthetic
FRRLCRNIKEVIKK

SEQ ID NO: 29 - protein, 17 aa, synthetic construct
  REGION 1..17: note = Synthetic
TQAWTNFKKWFKKWFKK

SEQ ID NO: 30 - protein, 17 aa, synthetic construct
  REGION 1..17: note = Synthetic
TQAWTNFKKWFKKWFKK

SEQ ID NO: 31 - protein, 17 aa, synthetic construct
  REGION 1..17: note = Synthetic
TQAWTNFKKWFKKWFKK

SEQ ID NO: 32 - protein, 17 aa, synthetic construct
  REGION 1..17: note = Synthetic
TQAWTNFKKWFKKWFKK

SEQ ID NO: 33 - protein, 15 aa, synthetic construct
  REGION 1..15: note = Synthetic
VKKFIEKLRTFIRKL

SEQ ID NO: 34 - protein, 15 aa, synthetic construct
  REGION 1..15: note = Synthetic
VKKFIEKLRTFIRKL

SEQ ID NO: 35 - protein, 15 aa, synthetic construct
  REGION 1..15: note = Synthetic
VKKFIEKLRTFIRKL

SEQ ID NO: 36 - protein, 16 aa, synthetic construct
  REGION 1..16: note = Synthetic
KEFLKSFAKLIRKVIR

SEQ ID NO: 37 - protein, 16 aa, synthetic construct
  REGION 1..16: note = Synthetic
KEFLKSFAKLIKKVIR

SEQ ID NO: 38 - protein, 16 aa, synthetic construct
  REGION 1..16: note = Synthetic
KEFLKSFAKLIKKVIR

SEQ ID NO: 39 - protein, 16 aa, synthetic construct
  REGION 1..16: note = Synthetic
KEFLKSFAKLIKKVIR

SEQ ID NO: 40 - protein, 16 aa, synthetic construct
  REGION 1..16: note = Synthetic
KEFLKSFAKLIKKVIR

SEQ ID NO: 41 - protein, 16 aa, synthetic construct
  REGION 1..16: note = Synthetic
KEFLKSLAKLIKKVIR

SEQ ID NO: 42 - protein, 16 aa, synthetic construct
  REGION 1..16: note = Synthetic
FFKWISKFIRRLSKCG

SEQ ID NO: 43 - protein, 15 aa, synthetic construct
  REGION 1..15: note = Synthetic
ANKANRMMRKIMRKL

SEQ ID NO: 44 - protein, 27 aa, synthetic construct
  REGION 1..27: note = Synthetic
WYQLIRTFGNLIHQKYRKLLEAYRKLR

SEQ ID NO: 45 - protein, 19 aa, synthetic construct
  REGION 1..19: note = Synthetic
FLKRLLREIKTCWNKILKG

SEQ ID NO: 46 - protein, 19 aa, synthetic construct
  REGION 1..19: note = Synthetic
FLKRLLREIKTCWNKILKG

SEQ ID NO: 47 - protein, 19 aa, synthetic construct
  REGION 1..19: note = Synthetic
FLKRLLREIKTCWNKILKG

SEQ ID NO: 48 - protein, 18 aa, synthetic construct
  REGION 1..18: note = Synthetic
IIKVITRALRGARRLLKY

SEQ ID NO: 49 - protein, 17 aa, synthetic construct
  REGION 1..17: note = Synthetic
FLKRLLQKIKTCWNKIL

SEQ ID NO: 50 - protein, 17 aa, synthetic construct
  REGION 1..17: note = Synthetic
FLKRLLQKIKTCWNKIL

SEQ ID NO: 51 - protein, 17 aa, synthetic construct
  REGION 1..17: note = Synthetic
FLKRLLQKIKTCWNKIL

SEQ ID NO: 52 - protein, 17 aa, synthetic construct
  REGION 1..17: note = Synthetic
FLKRLLQKIKTCWNKIL

SEQ ID NO: 53 - protein, 17 aa, synthetic construct
  REGION 1..17: note = Synthetic
FLKRLLQKIKTCWNKIL

SEQ ID NO: 54 - protein, 17 aa, synthetic construct
  REGION 1..17: note = Synthetic
FLKRLLQKIKTCWNKIL

SEQ ID NO: 55 - protein, 17 aa, synthetic construct
  REGION 1..17: note = Synthetic
FLKRLLQKIKTCWNKIL

SEQ ID NO: 56 - protein, 17 aa, synthetic construct
  REGION 1..17: note = Synthetic
FLKRLLQKIKTCWNKIL

SEQ ID NO: 57 - protein, 17 aa, synthetic construct
  REGION 1..17: note = Synthetic
NGLFQKIKRWWKRIFDR

SEQ ID NO: 58 - protein, 14 aa, synthetic construct
  REGION 1..14: note = Synthetic
RRCLQLAHKVIRKL

SEQ ID NO: 59 - protein, 15 aa, synthetic construct
  REGION 1..15: note = Synthetic
FIKKLMTFIRKVLKT

SEQ ID NO: 60 - protein, 22 aa, synthetic construct
  REGION 1..22: note = Synthetic
FVKRLLDEIKTCWNKILRGAKK

SEQ ID NO: 61 - protein, 22 aa, synthetic construct
  REGION 1..22: note = Synthetic
FVKRLLDEIKTCWNKILRGAKK

SEQ ID NO: 62 - protein, 22 aa, synthetic construct
  REGION 1..22: note = Synthetic
FVKRLLDEIKTCWNKILRGAKK

SEQ ID NO: 63 - protein, 22 aa, synthetic construct
  REGION 1..22: note = Synthetic
FVKRLLDEIKTCWNKILRGAKK

SEQ ID NO: 64 - protein, 22 aa, synthetic construct
  REGION 1..22: note = Synthetic
FVKRLLDEIKTCWNKILRGAKK

SEQ ID NO: 65 - protein, 22 aa, synthetic construct
  REGION 1..22: note = Synthetic
FVKRLLDEIKTCWNKILRGAKK

SEQ ID NO: 66 - protein, 19 aa, synthetic construct
  REGION 1..19: note = Synthetic
FLKTLLQKIKTCWNKILRG

SEQ ID NO: 67 - protein, 14 aa, synthetic construct
  REGION 1..14: note = Synthetic
ITKAAKCAKKIYKR

SEQ ID NO: 68 - protein, 17 aa, synthetic construct
  REGION 1..17: note = Synthetic
TQAWTNFKKWFKNWFKK

SEQ ID NO: 69 - protein, 16 aa, synthetic construct
  REGION 1..16: note = Synthetic
KEVIKKFTKAMEKMKK

SEQ ID NO: 70 - protein, 16 aa, synthetic construct
  REGION 1..16: note = Synthetic
KEVIKKFTKAMEKMKK

SEQ ID NO: 71 - protein, 16 aa, synthetic construct
  REGION 1..16: note = Synthetic
KEVIKKFTKAMEKMKK

SEQ ID NO: 72 - protein, 16 aa, synthetic construct
  REGION 1..16: note = Synthetic
KEVIKKFTKAMEKMKK

SEQ ID NO: 73 - protein, 16 aa, synthetic construct
  REGION 1..16: note = Synthetic
KEVIKKFTKAMEKMKK

SEQ ID NO: 74 - protein, 16 aa, synthetic construct
  REGION 1..16: note = Synthetic
KEVIKKFTKAMEKMKK

SEQ ID NO: 75 - protein, 16 aa, synthetic construct
  REGION 1..16: note = Synthetic
KEVIKKFTKAMEKMKK

SEQ ID NO: 76 - protein, 17 aa, synthetic construct
  REGION 1..17: note = Synthetic
NGLFQKIKRWWKRIFEH

SEQ ID NO: 77 - protein, 17 aa, synthetic construct
  REGION 1..17: note = Synthetic
NGLFQKIKRWWKRIFEH

SEQ ID NO: 78 - protein, 17 aa, synthetic construct
  REGION 1..17: note = Synthetic
NGLFQKIKRWWKRIFEH

SEQ ID NO: 79 - protein, 17 aa, synthetic construct
  REGION 1..17: note = Synthetic
NGLFQKIKRWWKRIFEH

SEQ ID NO: 80 - protein, 17 aa, synthetic construct
  REGION 1..17: note = Synthetic
NGLFQKIKRWWKRIFEH

SEQ ID NO: 81 - protein, 14 aa, synthetic construct
  REGION 1..14: note = Synthetic
ITKASKCAKKIYKR

SEQ ID NO: 82 - protein, 15 aa, synthetic construct
  REGION 1..15: note = Synthetic
LWDKFQKFLKKVIRI

SEQ ID NO: 83 - protein, 19 aa, synthetic construct
  REGION 1..19: note = Synthetic
CNHMPNLLTRCLQRLKRLK

SEQ ID NO: 84 - protein, 16 aa, synthetic construct
  REGION 1..16: note = Synthetic
HSFYKCIDNLCKRFRR

SEQ ID NO: 85 - protein, 15 aa, synthetic construct
  REGION 1..15: note = Synthetic
MRRCLQLIDKVIRKL

SEQ ID NO: 86 - protein, 15 aa, synthetic construct
  REGION 1..15: note = Synthetic
MRRCLQLIDKVIRKL

SEQ ID NO: 87 - protein, 15 aa, synthetic construct
  REGION 1..15: note = Synthetic
MRRCLQLIDKVIRKL

SEQ ID NO: 88 - protein, 15 aa, synthetic construct
  REGION 1..15: note = Synthetic
MRRCLQLIDKVIRKL

SEQ ID NO: 89 - protein, 15 aa, synthetic construct
  REGION 1..15: note = Synthetic
MRRCLQLIDKVIRKL

SEQ ID NO: 90 - protein, 15 aa, synthetic construct
  REGION 1..15: note = Synthetic
MRRCLQLIDKVIRKL

SEQ ID NO: 91 - protein, 15 aa, synthetic construct
  REGION 1..15: note = Synthetic
MRRCLQLIDKVIRKL

SEQ ID NO: 92 - protein, 15 aa, synthetic construct
  REGION 1..15: note = Synthetic
MRRCLQLIDKVIRKL

SEQ ID NO: 93 - protein, 15 aa, synthetic construct
  REGION 1..15: note = Synthetic
MRRCLQLIDKVIRKL

SEQ ID NO: 94 - protein, 15 aa, synthetic construct
  REGION 1..15: note = Synthetic
MRRCLQLIDKVIRKL

SEQ ID NO: 95 - protein, 15 aa, synthetic construct
  REGION 1..15: note = Synthetic
MRRCLQFIDKVIRKL

SEQ ID NO: 96 - protein, 15 aa, synthetic construct
  REGION 1..15: note = Synthetic
MRKCLQLIDKVIRKL

SEQ ID NO: 97 - protein, 15 aa, synthetic construct
  REGION 1..15: note = Synthetic
MRRCLQLIEKVIRKL

SEQ ID NO: 98 - protein, 16 aa, synthetic construct
  REGION 1..16: note = Synthetic
KEFLKSFEKLIKKVIR

SEQ ID NO: 99 - protein, 18 aa, synthetic construct
  REGION 1..18: note = Synthetic
NLCKRACRTCCTHCRRVP

SEQ ID NO: 100 - protein, 14 aa, synthetic construct
  REGION 1..14: note = Synthetic
RRCLQLIDKVIRKL

SEQ ID NO: 101 - protein, 16 aa, synthetic construct
  REGION 1..16: note = Synthetic
YARRFSTLFRHLIKMI

SEQ ID NO: 102 - protein, 15 aa, synthetic construct
  REGION 1..15: note = Synthetic
REFLKSFAKLIKKVI

SEQ ID NO: 103 - protein, 15 aa, synthetic construct
  REGION 1..15: note = Synthetic
MRRCLQLIDKVMRKL

SEQ ID NO: 104 - protein, 15 aa, synthetic construct
  REGION 1..15: note = Synthetic
MRRCLQLIDKVVRKL

SEQ ID NO: 105 - protein, 15 aa, synthetic construct
  REGION 1..15: note = Synthetic
MRRCLQLIDKAIRKI

SEQ ID NO: 106 - protein, 15 aa, synthetic construct
  REGION 1..15: note = Synthetic
MRRCLQLIDKAIRKL

SEQ ID NO: 107 - protein, 15 aa, synthetic construct
  REGION 1..15: note = Synthetic
MRRCLQLIDKAIKKL

SEQ ID NO: 108 - protein, 15 aa, synthetic construct
  REGION 1..15: note = Synthetic
MRRCLQLVDKVIRKL

SEQ ID NO: 109 - protein, 15 aa, synthetic construct
  REGION 1..15: note = Synthetic
MRRCLQFVDKVIKRL

SEQ ID NO: 110 - protein, 15 aa, synthetic construct
  REGION 1..15: note = Synthetic
MRKCLQLVDKVIRKL

SEQ ID NO: 111 - protein, 14 aa, synthetic construct
  REGION 1..14: note = Synthetic
VKKAVKYLRTIMKS

SEQ ID NO: 112 - protein, 16 aa, synthetic construct
  REGION 1..16: note = Synthetic
KEFLKSFAKLIKQVIR

SEQ ID NO: 113 - protein, 16 aa, synthetic construct
  REGION 1..16: note = Synthetic
KEFLKSFAKLIKQVIR

SEQ ID NO: 114 - protein, 16 aa, synthetic construct
  REGION 1..16: note = Synthetic
KEFLKSFAKLIKQVIR

SEQ ID NO: 115 - protein, 16 aa, synthetic construct
  REGION 1..16: note = Synthetic
KEFLKSFAKLIKQVIR

SEQ ID NO: 116 - protein, 14 aa, synthetic construct
  REGION 1..14: note = Synthetic
LSHLLARIWKPYKK

SEQ ID NO: 117 - protein, 19 aa, synthetic construct
  REGION 1..19: note = Synthetic
LSIFAKCFHDLIKKFKKLG

SEQ ID NO: 118 - protein, 15 aa, synthetic construct
  REGION 1..15: note = Synthetic
MRRCLQLIDKVARKL

SEQ ID NO: 119 - protein, 18 aa, synthetic construct
  REGION 1..18: note = Synthetic
LLQKIKTCWNKILRGIKE

SEQ ID NO: 120 - protein, 18 aa, synthetic construct
  REGION 1..18: note = Synthetic
LLQKIKTCWNKILRGIKE

SEQ ID NO: 121 - protein, 18 aa, synthetic construct
  REGION 1..18: note = Synthetic
LLQKIKTCWNKILRGIKE

SEQ ID NO: 122 - protein, 14 aa, synthetic construct
  REGION 1..14: note = Synthetic
FRKLFRVYSNFLRG

SEQ ID NO: 123 - protein, 19 aa, synthetic construct
  REGION 1..19: note = Synthetic
FLKRLLREIKTCWNKILNS

SEQ ID NO: 124 - protein, 16 aa, synthetic construct
  REGION 1..16: note = Synthetic
IRRCLQLIDKAVRKLY

SEQ ID NO: 125 - protein, 15 aa, synthetic construct
  REGION 1..15: note = Synthetic
NFLSLIKKIFSVWKR

SEQ ID NO: 126 - protein, 14 aa, synthetic construct
  REGION 1..14: note = Synthetic
KIMRKIMTNLSRLC

SEQ ID NO: 127 - protein, 17 aa, synthetic construct
  REGION 1..17: note = Synthetic
KEFLKSFAKLIQKVIKS

SEQ ID NO: 128 - protein, 15 aa, synthetic construct
  REGION 1..15: note = Synthetic
FIKKLMTFIQKVLKN

SEQ ID NO: 129 - protein, 14 aa, synthetic construct
  REGION 1..14: note = Synthetic
RDAGRLLRSLKKLK

SEQ ID NO: 130 - protein, 17 aa, synthetic construct
  REGION 1..17: note = Synthetic
KNATTFIKKLMTFIRKA

SEQ ID NO: 131 - protein, 16 aa, synthetic construct
  REGION 1..16: note = Synthetic
GEMKNAMKKLWTRVRK

SEQ ID NO: 132 - protein, 17 aa, synthetic construct
  REGION 1..17: note = Synthetic
TQAWTNFKKWFKKWFKE

SEQ ID NO: 133 - protein, 17 aa, synthetic construct
  REGION 1..17: note = Synthetic
TQAWTNFKKWFKKWFKE

SEQ ID NO: 134 - protein, 19 aa, synthetic construct
  REGION 1..19: note = Synthetic
EVAQFVKDLLRHLKRLYRH

SEQ ID NO: 135 - protein, 14 aa, synthetic construct
  REGION 1..14: note = Synthetic
GAGRKVCAKLVKRL

SEQ ID NO: 136 - protein, 16 aa, synthetic construct
  REGION 1..16: note = Synthetic
LLQKIKTCWNKILRGS

SEQ ID NO: 137 - protein, 16 aa, synthetic construct
  REGION 1..16: note = Synthetic
LLQKIKTCWNKILRGS

SEQ ID NO: 138 - protein, 16 aa, synthetic construct
  REGION 1..16: note = Synthetic
LLQKIKTCWNKILRGS

SEQ ID NO: 139 - protein, 15 aa, synthetic construct
  REGION 1..15: note = Synthetic
NFIKRINDFLKKAKS

SEQ ID NO: 140 - protein, 23 aa, synthetic construct
  REGION 1..23: note = Synthetic
RFLHGYHRFMHSVGRVFSKWGES

SEQ ID NO: 141 - protein, 19 aa, synthetic construct
  REGION 1..19: note = Synthetic
LLQKIKTCWNKILRGAKEY

SEQ ID NO: 142 - protein, 19 aa, synthetic construct
  REGION 1..19: note = Synthetic
LLQKIKTCWNKILRGAKEY

SEQ ID NO: 143 - protein, 19 aa, synthetic construct
  REGION 1..19: note = Synthetic
LLQKIKTCWNKILRGAKEY

SEQ ID NO: 144 - protein, 19 aa, synthetic construct
  REGION 1..19: note = Synthetic
LLQKIKTCWNKILRGAKEY

SEQ ID NO: 145 - protein, 15 aa, synthetic construct
  REGION 1..15: note = Synthetic
FINKLMTFIRKALKP

SEQ ID NO: 146 - protein, 12 aa, synthetic construct
  REGION 1..12: note = Synthetic
LKDFLKSLKRIM

SEQ ID NO: 147 - protein, 13 aa, synthetic construct
  REGION 1..13: note = Synthetic
GRGIRPVGRFGRR

SEQ ID NO: 148 - protein, 16 aa, synthetic construct
  REGION 1..16: note = Synthetic
NGLWQRFLRWWNRLFH

SEQ ID NO: 149 - protein, 16 aa, synthetic construct
  REGION 1..16: note = Synthetic
NGLWQRFLRWWNRLFH

SEQ ID NO: 150 - protein, 16 aa, synthetic construct
  REGION 1..16: note = Synthetic
NGLWQRFLRWWNRLFH

SEQ ID NO: 151 - protein, 12 aa, synthetic construct
  REGION 1..12: note = Synthetic
SADKFWRRFARR

SEQ ID NO: 152 - protein, 16 aa, synthetic construct
  REGION 1..16: note = Synthetic
WSRWWSSCWRLWTRIY

SEQ ID NO: 153 - protein, 15 aa, synthetic construct
  REGION 1..15: note = Synthetic
YLKEALSRFKSWLKR

SEQ ID NO: 154 - protein, 14 aa, synthetic construct
  REGION 1..14: note = Synthetic
SPGRKLYNQIRRWP

SEQ ID NO: 155 - protein, 20 aa, synthetic construct
  REGION 1..20: note = Synthetic
KYGKSCEKAVHDLWHIIKKF

SEQ ID NO: 156 - protein, 14 aa, synthetic construct
  REGION 1..14: note = Synthetic
KVYSSVRKICKSCG

SEQ ID NO: 157 - protein, 15 aa, synthetic construct
  REGION 1..15: note = Synthetic
TQAWTNFKKWFKKMV

SEQ ID NO: 158 - protein, 14 aa, synthetic construct
  REGION 1..14: note = Synthetic
KIGASVRKICEKCR

SEQ ID NO: 159 - protein, 20 aa, synthetic construct
  REGION 1..20: note = Synthetic
GGGRDVLTRFKSWFKRVFGK

SEQ ID NO: 160 - protein, 14 aa, synthetic construct
  REGION 1..14: note = Synthetic
ITKASTCAKKIFKR

SEQ ID NO: 161 - protein, 17 aa, synthetic construct
  REGION 1..17: note = Synthetic
FIEKLMTFIRKALKNAR

SEQ ID NO: 162 - protein, 14 aa, synthetic construct
  REGION 1..14: note = Synthetic
AYYKRCARLLTRLA

SEQ ID NO: 163 - protein, 14 aa, synthetic construct
  REGION 1..14: note = Synthetic
AYYKRCARLLTRLA

SEQ ID NO: 164 - protein, 15 aa, synthetic construct
  REGION 1..15: note = Synthetic
SQLRNLIRSVRTVMR

SEQ ID NO: 165 - protein, 17 aa, synthetic construct
  REGION 1..17: note = Synthetic
KNATKFIEKLMTFIRRA

SEQ ID NO: 166 - protein, 15 aa, synthetic construct
  REGION 1..15: note = Synthetic
YASRGIRPVGRFGRR

SEQ ID NO: 167 - protein, 15 aa, synthetic construct
  REGION 1..15: note = Synthetic
HLKRYYGRILHYLKA

SEQ ID NO: 168 - protein, 17 aa, synthetic construct
  REGION 1..17: note = Synthetic
TIPAYYKRCARLLTRLA

SEQ ID NO: 169 - protein, 17 aa, synthetic construct
  REGION 1..17: note = Synthetic
TIPAYYKRCARLLTRLA

SEQ ID NO: 170 - protein, 17 aa, synthetic construct
  REGION 1..17: note = Synthetic
TIPAYYKRCARLLTRLA

SEQ ID NO: 171 - protein, 12 aa, synthetic construct
  REGION 1..12: note = Synthetic
VGRVHRLLRKGN

SEQ ID NO: 172 - protein, 14 aa, synthetic construct
  REGION 1..14: note = Synthetic
KVAASVRKICEKCR

SEQ ID NO: 173 - protein, 18 aa, synthetic construct
  REGION 1..18: note = Synthetic
IRKIAQLLNKVADAAKKG

SEQ ID NO: 174 - protein, 15 aa, synthetic construct
  REGION 1..15: note = Synthetic
GGFCKRFAGGAKKCH

SEQ ID NO: 175 - protein, 13 aa, synthetic construct
  REGION 1..13: note = Synthetic
MRFMRRLVRNLQY

SEQ ID NO: 176 - protein, 12 aa, synthetic construct
  REGION 1..12: note = Synthetic
LPGFIGKICRKI

SEQ ID NO: 177 - protein, 14 aa, synthetic construct
  REGION 1..14: note = Synthetic
ILANIHKIIKAYQR

SEQ ID NO: 178 - protein, 12 aa, synthetic construct
  REGION 1..12: note = Synthetic
IFHGCKKVARVL

SEQ ID NO: 179 - protein, 23 aa, synthetic construct
  REGION 1..23: note = Synthetic
LAKRYGGFMKRYGGFMKKMDELY

SEQ ID NO: 180 - protein, 15 aa, synthetic construct
  REGION 1..15: note = Synthetic
QAIRCMQSLFRTVKR

SEQ ID NO: 181 - protein, 14 aa, synthetic construct
  REGION 1..14: note = Synthetic
WRRALRAAAGPLAR

SEQ ID NO: 182 - protein, 14 aa, synthetic construct
  REGION 1..14: note = Synthetic
IKRIIRDVKEIVRA

SEQ ID NO: 183 - protein, 16 aa, synthetic construct
  REGION 1..16: note = Synthetic
KEFLKSFEKLIQKVIR

SEQ ID NO: 184 - protein, 16 aa, synthetic construct
  REGION 1..16: note = Synthetic
EKVSNWWKRIWEKIKN

SEQ ID NO: 185 - protein, 16 aa, synthetic construct
  REGION 1..16: note = Synthetic
EKVSNWWKRIWEKIKN

SEQ ID NO: 186 - protein, 23 aa, synthetic construct
  REGION 1..23: note = Synthetic
IPSCVTRALSRAARSIWDALKKI

SEQ ID NO: 187 - protein, 14 aa, synthetic construct
  REGION 1..14: note = Synthetic
ARKLYTIMNSFCRR

SEQ ID NO: 188 - protein, 29 aa, synthetic construct
  REGION 1..29: note = Synthetic
GKLMELGHKIMKNLENTVKEIIKYLKSLF

SEQ ID NO: 189 - protein, 20 aa, synthetic construct
  REGION 1..20: note = Synthetic
KPIKEFLERLKSLIQKMIHQ

SEQ ID NO: 190 - protein, 20 aa, synthetic construct
  REGION 1..20: note = Synthetic
KPIKEFLERLKSLIQKMIHQ

SEQ ID NO: 191 - protein, 20 aa, synthetic construct
  REGION 1..20: note = Synthetic
KPIKEFLERLKSLIQKMIHQ

SEQ ID NO: 192 - protein, 15 aa, synthetic construct
  REGION 1..15: note = Synthetic
KEFLKSFAKLIQKVI

SEQ ID NO: 193 - protein, 15 aa, synthetic construct
  REGION 1..15: note = Synthetic
KEFLKSFAKLIQKVI

SEQ ID NO: 194 - protein, 12 aa, synthetic construct
  REGION 1..12: note = Synthetic
RRLKGVAKKGLG

SEQ ID NO: 195 - protein, 17 aa, synthetic construct
  REGION 1..17: note = Synthetic
FLKRLLQEIKTCWNKIL

SEQ ID NO: 196 - protein, 17 aa, synthetic construct
  REGION 1..17: note = Synthetic
FLKRLLQEIKTCWNKIL

SEQ ID NO: 197 - protein, 17 aa, synthetic construct
  REGION 1..17: note = Synthetic
FLKRLLQEIKTCWNKIL

SEQ ID NO: 198 - protein, 17 aa, synthetic construct
  REGION 1..17: note = Synthetic
FLKRLLQEIKTCWNKIL

SEQ ID NO: 199 - protein, 17 aa, synthetic construct
  REGION 1..17: note = Synthetic
FLKRLLQEIKTCWNKIL

SEQ ID NO: 200 - protein, 17 aa, synthetic construct
  REGION 1..17: note = Synthetic
FLKRLLQEIKTCWNKIL

SEQ ID NO: 201 - protein, 17 aa, synthetic construct
  REGION 1..17: note = Synthetic
FLKRLLQEIKTCWNKIL

SEQ ID NO: 202 - protein, 20 aa, synthetic construct
  REGION 1..20: note = Synthetic
KPLKEFLERLKSLIQKMIHQ

SEQ ID NO: 203 - protein, 16 aa, synthetic construct
  REGION 1..16: note = Synthetic
KEFLKSFANLIKQVIR

SEQ ID NO: 204 - protein, 37 aa, synthetic construct
  REGION 1..37: note = Synthetic
GKLMELGHKIMRNLENTVKETIKYLKSLFSHASEVVK

SEQ ID NO: 205 - protein, 12 aa, synthetic construct
  REGION 1..12: note = Synthetic
HKMKKLLRYLNY

SEQ ID NO: 206 - protein, 17 aa, synthetic construct
  REGION 1..17: note = Synthetic
KSFSSICKELCKLCQRC

SEQ ID NO: 207 - protein, 17 aa, synthetic construct
  REGION 1..17: note = Synthetic
KSFSSICKELCKLCQRC

SEQ ID NO: 208 - protein, 16 aa, synthetic construct
  REGION 1..16: note = Synthetic
KEFLQSFGKLINKVIR

SEQ ID NO: 209 - protein, 21 aa, synthetic construct
  REGION 1..21: note = Synthetic
ILANFQRFLETAYRALRHLAR

SEQ ID NO: 210 - protein, 16 aa, synthetic construct
  REGION 1..16: note = Synthetic
KEFLKSFAKLIQQVIR

SEQ ID NO: 211 - protein, 16 aa, synthetic construct
  REGION 1..16: note = Synthetic
KEFLKSFAKLIQQVIR

SEQ ID NO: 212 - protein, 16 aa, synthetic construct
  REGION 1..16: note = Synthetic
KEFLKSFAKLIQQVIR

SEQ ID NO: 213 - protein, 16 aa, synthetic construct
  REGION 1..16: note = Synthetic
KEFLKSFAKLIQQVIR

SEQ ID NO: 214 - protein, 14 aa, synthetic construct
  REGION 1..14: note = Synthetic
KEFLQSFSKLMKKV

SEQ ID NO: 215 - protein, 18 aa, synthetic construct
  REGION 1..18: note = Synthetic
KPLHTMVNHISRFATKMT

SEQ ID NO: 216 - protein, 15 aa, synthetic construct
  REGION 1..15: note = Synthetic
GGKLFDVLKKIIKVI

SEQ ID NO: 217 - protein, 16 aa, synthetic construct
  REGION 1..16: note = Synthetic
KEFLQSFAKLIKQVIR

SEQ ID NO: 218 - protein, 18 aa, synthetic construct
  REGION 1..18: note = Synthetic
LLQKIKTCWNKILRGITE

SEQ ID NO: 219 - protein, 18 aa, synthetic construct
  REGION 1..18: note = Synthetic
RIRDVFSSIFRNIFNLFR

SEQ ID NO: 220 - protein, 18 aa, synthetic construct
  REGION 1..18: note = Synthetic
QKIAQLVKKWIKTVLEAR

SEQ ID NO: 221 - protein, 38 aa, synthetic construct
  REGION 1..38: note = Synthetic
GKLMELGHKIMRNLENTVKETIKYLKSLFSHAFEVVKT

SEQ ID NO: 222 - protein, 21 aa, synthetic construct
  REGION 1..21: note = Synthetic
EVTRLAKDLLQQLRKGVRQGK

SEQ ID NO: 223 - protein, 21 aa, synthetic construct
  REGION 1..21: note = Synthetic
EVTRLAKDLLQQLRKGVRQGK

SEQ ID NO: 224 - protein, 12 aa, synthetic construct
  REGION 1..12: note = Synthetic
LPRLLRTYISRI

SEQ ID NO: 225 - protein, 12 aa, synthetic construct
  REGION 1..12: note = Synthetic
LPRLLRTYISRI

SEQ ID NO: 226 - protein, 17 aa, synthetic construct
  REGION 1..17: note = Synthetic
LKKLNQIVQKFHQLLQG

SEQ ID NO: 227 - protein, 16 aa, synthetic construct
  REGION 1..16: note = Synthetic
DFKNLIRKCVDVARKV

SEQ ID NO: 228 - protein, 19 aa, synthetic construct
  REGION 1..19: note = Synthetic
NATTYLKEALSRFKSWLKR

SEQ ID NO: 229 - protein, 19 aa, synthetic construct
  REGION 1..19: note = Synthetic
NATTYLKEALSRFKSWLKR

SEQ ID NO: 230 - protein, 19 aa, synthetic construct
  REGION 1..19: note = Synthetic
NATTYLKEALSRFKSWLKR

SEQ ID NO: 231 - protein, 16 aa, synthetic construct
  REGION 1..16: note = Synthetic
KWVQKVVQAFLKRAEK

SEQ ID NO: 232 - protein, 14 aa, synthetic construct
  REGION 1..14: note = Synthetic
ARKMVTRALRALQN

SEQ ID NO: 233 - protein, 17 aa, synthetic construct
  REGION 1..17: note = Synthetic
KEFLERFKSLLQKMIHR

SEQ ID NO: 234 - protein, 13 aa, synthetic construct
  REGION 1..13: note = Synthetic
AKKALAKAKTVLK

SEQ ID NO: 235 - protein, 17 aa, synthetic construct
  REGION 1..17: note = Synthetic
NGLWQRFLRWWNRLFTG

SEQ ID NO: 236 - protein, 17 aa, synthetic construct
  REGION 1..17: note = Synthetic
NGLWQRFLRWWNRLFTG

SEQ ID NO: 237 - protein, 17 aa, synthetic construct
  REGION 1..17: note = Synthetic
NGLWQRFLRWWNRLFTG

SEQ ID NO: 238 - protein, 21 aa, synthetic construct
  REGION 1..21: note = Synthetic
ATKLSDAMQRIKTMFRNWYQK

SEQ ID NO: 239 - protein, 13 aa, synthetic construct
  REGION 1..13: note = Synthetic
CITFCNKCCRKCL

SEQ ID NO: 240 - protein, 19 aa, synthetic construct
  REGION 1..19: note = Synthetic
CCDLIRKCWHDIKECWKRC

SEQ ID NO: 241 - protein, 12 aa, synthetic construct
  REGION 1..12: note = Synthetic
KLFRIYSNFLRG

SEQ ID NO: 242 - protein, 12 aa, synthetic construct
  REGION 1..12: note = Synthetic
KLFRIYSNFLRG

SEQ ID NO: 243 - protein, 12 aa, synthetic construct
  REGION 1..12: note = Synthetic
KLFRIYSNFLRG

SEQ ID NO: 244 - protein, 12 aa, synthetic construct
  REGION 1..12: note = Synthetic
KLFRIYSNFLRG

SEQ ID NO: 245 - protein, 12 aa, synthetic construct
  REGION 1..12: note = Synthetic
KLFRIYSNFLRG

SEQ ID NO: 246 - protein, 12 aa, synthetic construct
  REGION 1..12: note = Synthetic
KLFRIYSNFLRG

SEQ ID NO: 247 - protein, 12 aa, synthetic construct
  REGION 1..12: note = Synthetic
KLFRIYSNFLRG

SEQ ID NO: 248 - protein, 16 aa, synthetic construct
  REGION 1..16: note = Synthetic
EKFESCMKKCSKICNK

SEQ ID NO: 249 - protein, 12 aa, synthetic construct
  REGION 1..12: note = Synthetic
KLFRVYSNFLRG

SEQ ID NO: 250 - protein, 12 aa, synthetic construct
  REGION 1..12: note = Synthetic
KLFRVYSNFLRG

SEQ ID NO: 251 - protein, 12 aa, synthetic construct
  REGION 1..12: note = Synthetic
KLFRVYSNFLRG

SEQ ID NO: 252 - protein, 12 aa, synthetic construct
  REGION 1..12: note = Synthetic
KLFRVYSNFLRG

SEQ ID NO: 253 - protein, 15 aa, synthetic construct
  REGION 1..15: note = Synthetic
RKLYHRVGTCIQNIF

SEQ ID NO: 254 - protein, 12 aa, synthetic construct
  REGION 1..12: note = Synthetic
FKSLKGYWSKFT

SEQ ID NO: 255 - protein, 17 aa, synthetic construct
  REGION 1..17: note = Synthetic
ISSLRSCWNKFEKIISR

SEQ ID NO: 256 - protein, 21 aa, synthetic construct
  REGION 1..21: note = Synthetic
VNHYHRGCEKITRCARDAARY

SEQ ID NO: 257 - protein, 17 aa, synthetic construct
  REGION 1..17: note = Synthetic
ISSLRSCWNKFEKLISR

SEQ ID NO: 258 - protein, 20 aa, synthetic construct
  REGION 1..20: note = Synthetic
CCRKVVKYWTHCCQEGLRCT

SEQ ID NO: 259 - protein, 17 aa, synthetic construct
  REGION 1..17: note = Synthetic
GRTFRSCARTAFRTAKL

SEQ ID NO: 260 - protein, 12 aa, synthetic construct
  REGION 1..12: note = Synthetic
KLFRVYANFLRG

SEQ ID NO: 261 - protein, 12 aa, synthetic construct
  REGION 1..12: note = Synthetic
YGRGCRRCCSYL

SEQ ID NO: 262 - protein, 19 aa, synthetic construct
  REGION 1..19: note = Synthetic
FLKRLLQEIKTCWNKILSG

SEQ ID NO: 263 - protein, 19 aa, synthetic construct
  REGION 1..19: note = Synthetic
FLKRLLQEIKTCWNKILSG

SEQ ID NO: 264 - protein, 19 aa, synthetic construct
  REGION 1..19: note = Synthetic
FLKRLLQEIKTCWNKILSG

SEQ ID NO: 265 - protein, 14 aa, synthetic construct
  REGION 1..14: note = Synthetic
SVARHAARDLRRWM

SEQ ID NO: 266 - protein, 18 aa, synthetic construct
  REGION 1..18: note = Synthetic
LLQKIKTCWNKILRDAKE

SEQ ID NO: 267 - protein, 17 aa, synthetic construct
  REGION 1..17: note = Synthetic
WAKYHAAVRHYVNLITR

SEQ ID NO: 268 - protein, 17 aa, synthetic construct
  REGION 1..17: note = Synthetic
WAKYHAAVRHYVNLITR

SEQ ID NO: 269 - protein, 15 aa, synthetic construct
  REGION 1..15: note = Synthetic
EEVFKKFKKVAKSFG

SEQ ID NO: 270 - protein, 14 aa, synthetic construct
  REGION 1..14: note = Synthetic
FGRAGAKFIRFGRS

SEQ ID NO: 271 - protein, 15 aa, synthetic construct
  REGION 1..15: note = Synthetic
DLKTLFTTIWKFIKK

SEQ ID NO: 272 - protein, 13 aa, synthetic construct
  REGION 1..13: note = Synthetic
KKCCGGCPRLCEK

SEQ ID NO: 273 - protein, 18 aa, synthetic construct
  REGION 1..18: note = Synthetic
KQVANPYRRGCGTIERCR

SEQ ID NO: 274 - protein, 14 aa, synthetic construct
  REGION 1..14: note = Synthetic
SDAKKLMRDLKRML

SEQ ID NO: 275 - protein, 15 aa, synthetic construct
  REGION 1..15: note = Synthetic
NKGMNEFKKILRTLA

SEQ ID NO: 276 - protein, 13 aa, synthetic construct
  REGION 1..13: note = Synthetic
FTKIKDALKKISQ

SEQ ID NO: 277 - protein, 12 aa, synthetic construct
  REGION 1..12: note = Synthetic
VRKIYQTAKHLP

SEQ ID NO: 278 - protein, 15 aa, synthetic construct
  REGION 1..15: note = Synthetic
VHNYSRGCSRITRCR

SEQ ID NO: 279 - protein, 15 aa, synthetic construct
  REGION 1..15: note = Synthetic
KIKRIVQKILESAER

SEQ ID NO: 280 - protein, 13 aa, synthetic construct
  REGION 1..13: note = Synthetic
ARMATKLGRKVLN

SEQ ID NO: 281 - protein, 15 aa, synthetic construct
  REGION 1..15: note = Synthetic
KTLVNLWSKLAQRIF

SEQ ID NO: 282 - protein, 35 aa, synthetic construct
  REGION 1..35: note = Synthetic
QALAKAGKGMHGGVPGGKQFIENGSEFAQKLLKKF

SEQ ID NO: 283 - protein, 18 aa, synthetic construct
  REGION 1..18: note = Synthetic
NPYRRGCSAITHCYRYAR

SEQ ID NO: 284 - protein, 17 aa, synthetic construct
  REGION 1..17: note = Synthetic
RVKQVLNQLLKNMDHLK

SEQ ID NO: 285 - protein, 14 aa, synthetic construct
  REGION 1..14: note = Synthetic
VSSFLEHVKRCVRH

SEQ ID NO: 286 - protein, 17 aa, synthetic construct
  REGION 1..17: note = Synthetic
LRTVTELLKKVVDAAKK

SEQ ID NO: 287 - protein, 14 aa, synthetic construct
  REGION 1..14: note = Synthetic
AKALFNKLTEYLKK

SEQ ID NO: 288 - protein, 20 aa, synthetic construct
  REGION 1..20: note = Synthetic
EVAQFVKDLLRHLRKLFHQG

SEQ ID NO: 289 - protein, 20 aa, synthetic construct
  REGION 1..20: note = Synthetic
EVAQFVKDLLRHLRKLFHQG

SEQ ID NO: 290 - protein, 20 aa, synthetic construct
  REGION 1..20: note = Synthetic
EVAQFVKDLLRHLRKLFHQG

SEQ ID NO: 291 - protein, 16 aa, synthetic construct
  REGION 1..16: note = Synthetic
KNLLKMLSKAVDALKS

SEQ ID NO: 292 - protein, 14 aa, synthetic construct
  REGION 1..14: note = Synthetic
LRRYFHRIDNFLKE

SEQ ID NO: 293 - protein, 12 aa, synthetic construct
  REGION 1..12: note = Synthetic
SRCYRSLYKCVA

SEQ ID NO: 294 - protein, 22 aa, synthetic construct
  REGION 1..22: note = Synthetic
QWLTSCWSTLMRLIHQMAGRYR

SEQ ID NO: 295 - protein, 14 aa, synthetic construct
  REGION 1..14: note = Synthetic
ASVRKMCEKCRTIR

SEQ ID NO: 296 - protein, 13 aa, synthetic construct
  REGION 1..13: note = Synthetic
CLKNAARGIRGLN

SEQ ID NO: 297 - protein, 13 aa, synthetic construct
  REGION 1..13: note = Synthetic
CLKNAARGIKGLN

SEQ ID NO: 298 - protein, 15 aa, synthetic construct
  REGION 1..15: note = Synthetic
EVAQFIKDLLRHLKK

SEQ ID NO: 299 - protein, 13 aa, synthetic construct
  REGION 1..13: note = Synthetic
GGAIGKFMNVLRR

SEQ ID NO: 300 - protein, 15 aa, synthetic construct
  REGION 1..15: note = Synthetic
ANEYRRGCSKITRCK

SEQ ID NO: 301 - protein, 13 aa, synthetic construct
  REGION 1..13: note = Synthetic
RSFRNGVGSGVKK

SEQ ID NO: 302 - protein, 14 aa, synthetic construct
  REGION 1..14: note = Synthetic
TILRKARNLLNHGI

SEQ ID NO: 303 - protein, 18 aa, synthetic construct
  REGION 1..18: note = Synthetic
AVWKDFLKNIGKAAGKAV

SEQ ID NO: 304 - protein, 27 aa, synthetic construct
  REGION 1..27: note = Synthetic
KHAHSMITSMLSFVNSVVNFGRSFVRN

SEQ ID NO: 305 - protein, 14 aa, synthetic construct
  REGION 1..14: note = Synthetic
VKKMLKDVPKLATS

SEQ ID NO: 306 - protein, 12 aa, synthetic construct
  REGION 1..12: note = Synthetic
RACQQFLKRCHL

SEQ ID NO: 307 - protein, 12 aa, synthetic construct
  REGION 1..12: note = Synthetic
NVLRALRRLGSS

SEQ ID NO: 308 - protein, 20 aa, synthetic construct
  REGION 1..20: note = Synthetic
GKNWSEFVRSMLRAMSKVAA

SEQ ID NO: 309 - protein, 18 aa, synthetic construct
  REGION 1..18: note = Synthetic
ELITFMKNLLDHLRRIYR

SEQ ID NO: 310 - protein, 16 aa, synthetic construct
  REGION 1..16: note = Synthetic
ICKSFQSLVHRFGHVT

SEQ ID NO: 311 - protein, 12 aa, synthetic construct
  REGION 1..12: note = Synthetic
LKCCKSMCGKVC

SEQ ID NO: 312 - protein, 12 aa, synthetic construct
  REGION 1..12: note = Synthetic
KRMEYIAKKLDK

SEQ ID NO: 313 - protein, 17 aa, synthetic construct
  REGION 1..17: note = Synthetic
ASVVQQIFQRIIRVLRS

SEQ ID NO: 314 - protein, 13 aa, synthetic construct
  REGION 1..13: note = Synthetic
KRLRKMGGDLNSL

SEQ ID NO: 315 - protein, 18 aa, synthetic construct
  REGION 1..18: note = Synthetic
KSYVEKLTKALSTIRQCI

SEQ ID NO: 316 - protein, 12 aa, synthetic construct
  REGION 1..12: note = Synthetic
RLGRQLHNIVDK

SEQ ID NO: 317 - protein, 15 aa, synthetic construct
  REGION 1..15: note = Synthetic
SQLTNLIRSVRTVMR

SEQ ID NO: 318 - protein, 14 aa, synthetic construct
  REGION 1..14: note = Synthetic
LKDLGSRARAWLRS

SEQ ID NO: 319 - protein, 13 aa, synthetic construct
  REGION 1..13: note = Synthetic
RSFRNGVGTGMKK

SEQ ID NO: 320 - protein, 13 aa, synthetic construct
  REGION 1..13: note = Synthetic
RSFRNGVGTGMKK

SEQ ID NO: 321 - protein, 14 aa, synthetic construct
  REGION 1..14: note = Synthetic
YRRGCSVITHCYRQ

SEQ ID NO: 322 - protein, 13 aa, synthetic construct
  REGION 1..13: note = Synthetic
CLKGIARGIHNLN

SEQ ID NO: 323 - protein, 12 aa, synthetic construct
  REGION 1..12: note = Synthetic
RFGRNAWGPWSK

SEQ ID NO: 324 - protein, 15 aa, synthetic construct
  REGION 1..15: note = Synthetic
ANPYSRGCSKIARCR

SEQ ID NO: 325 - protein, 12 aa, synthetic construct
  REGION 1..12: note = Synthetic
ILHSFLKVLHHL

SEQ ID NO: 326 - protein, 15 aa, synthetic construct
  REGION 1..15: note = Synthetic
IKCAKKIARDAHGLT

SEQ ID NO: 327 - protein, 16 aa, synthetic construct
  REGION 1..16: note = Synthetic
VLKLWNSVLKHICNLS

SEQ ID NO: 328 - protein, 17 aa, synthetic construct
  REGION 1..17: note = Synthetic
LRQLRSFMQDVFRSLRC

SEQ ID NO: 329 - protein, 12 aa, synthetic construct
  REGION 1..12: note = Synthetic
GRHLLNELKKWP

SEQ ID NO: 330 - protein, 14 aa, synthetic construct
  REGION 1..14: note = Synthetic
NCLKGIARGIHNLN

SEQ ID NO: 331 - protein, 12 aa, synthetic construct
  REGION 1..12: note = Synthetic
WRRVMHCFSYCW

SEQ ID NO: 332 - protein, 13 aa, synthetic construct
  REGION 1..13: note = Synthetic
RSFRNGVGSGAKK

SEQ ID NO: 333 - protein, 21 aa, synthetic construct
  REGION 1..21: note = Synthetic
DLTRALHDLVKALKKAYRTLD

SEQ ID NO: 334 - protein, 12 aa, synthetic construct
  REGION 1..12: note = Synthetic
KRLRKMGGDLNS

SEQ ID NO: 335 - protein, 17 aa, synthetic construct
  REGION 1..17: note = Synthetic
KNATTFIEKLMTFIRKA

SEQ ID NO: 336 - protein, 15 aa, synthetic construct
  REGION 1..15: note = Synthetic
EVIQLVKNLLNHLRR

SEQ ID NO: 337 - protein, 18 aa, synthetic construct
  REGION 1..18: note = Synthetic
LKEFLERLKSLIQKMIHQ

SEQ ID NO: 338 - protein, 15 aa, synthetic construct
  REGION 1..15: note = Synthetic
VNEYSRGCSKIHRCR

SEQ ID NO: 339 - protein, 15 aa, synthetic construct
  REGION 1..15: note = Synthetic
VNEYSRGCSKIHRCR

SEQ ID NO: 340 - protein, 15 aa, synthetic construct
  REGION 1..15: note = Synthetic
VNEYSRGCSKIHRCR

SEQ ID NO: 341 - protein, 21 aa, synthetic construct
  REGION 1..21: note = Synthetic
CGQFTRLCRHFVHELKQALTS

SEQ ID NO: 342 - protein, 21 aa, synthetic construct
  REGION 1..21: note = Synthetic
CGQFTRLCRHFVHELKQALTS

SEQ ID NO: 343 - protein, 12 aa, synthetic construct
  REGION 1..12: note = Synthetic
DKAKKAIERIKQ

SEQ ID NO: 344 - protein, 16 aa, synthetic construct
  REGION 1..16: note = Synthetic
EKISDWWKRIWEKIKN

SEQ ID NO: 345 - protein, 22 aa, synthetic construct
  REGION 1..22: note = Synthetic
LENMKTVIKSGVEKLKNFLQRG

SEQ ID NO: 346 - protein, 16 aa, synthetic construct
  REGION 1..16: note = Synthetic
NATRFMEKLMTFVRKA

SEQ ID NO: 347 - protein, 14 aa, synthetic construct
  REGION 1..14: note = Synthetic
RMATKAGRRVINAR

SEQ ID NO: 348 - protein, 19 aa, synthetic construct
  REGION 1..19: note = Synthetic
ILANFQRFLETAYRALRHL

SEQ ID NO: 349 - protein, 12 aa, synthetic construct
  REGION 1..12: note = Synthetic
RFGRSAWGSWSK

SEQ ID NO: 350 - protein, 16 aa, synthetic construct
  REGION 1..16: note = Synthetic
THVKQAINKMLTKISS

SEQ ID NO: 351 - protein, 16 aa, synthetic construct
  REGION 1..16: note = Synthetic
RELPKVCRNIFSRVSL

SEQ ID NO: 352 - protein, 14 aa, synthetic construct
  REGION 1..14: note = Synthetic
ASVRKICSRCVALK

SEQ ID NO: 353 - protein, 14 aa, synthetic construct
  REGION 1..14: note = Synthetic
LSRYAKLANRLANP

SEQ ID NO: 354 - protein, 42 aa, synthetic construct
  REGION 1..42: note = Synthetic
DILRECAKGLEVRVAENQHLANETVEYFFKKLWRGVKKVVKK

SEQ ID NO: 355 - protein, 25 aa, synthetic construct
  REGION 1..25: note = Synthetic
YGCCRKGYNGCKRCCSYAGEAIDKV

SEQ ID NO: 356 - protein, 25 aa, synthetic construct
  REGION 1..25: note = Synthetic
YGCCRKGYNGCKRCCSYAGEAIDKV

SEQ ID NO: 357 - protein, 18 aa, synthetic construct
  REGION 1..18: note = Synthetic
QEFLNSFSKLMQKVIKIH

SEQ ID NO: 358 - protein, 12 aa, synthetic construct
  REGION 1..12: note = Synthetic
RCLSPMNHLCHK

SEQ ID NO: 359 - protein, 12 aa, synthetic construct
  REGION 1..12: note = Synthetic
RCLSPMNHLCHK

SEQ ID NO: 360 - protein, 17 aa, synthetic construct
  REGION 1..17: note = Synthetic
AFNAVKRLLDQARQLGR

SEQ ID NO: 361 - protein, 17 aa, synthetic construct
  REGION 1..17: note = Synthetic
AAKNALQKFIEEMKKIK

SEQ ID NO: 362 - protein, 20 aa, synthetic construct
  REGION 1..20: note = Synthetic
EVKKIWATIIERLYKLWRDW

SEQ ID NO: 363 - protein, 12 aa, synthetic construct
  REGION 1..12: note = Synthetic
GLKTAYRRIYGI

SEQ ID NO: 364 - protein, 12 aa, synthetic construct
  REGION 1..12: note = Synthetic
GLKTAYKRIYGI

SEQ ID NO: 365 - protein, 12 aa, synthetic construct
  REGION 1..12: note = Synthetic
GLKTAYKRIYGI

SEQ ID NO: 366 - protein, 14 aa, synthetic construct
  REGION 1..14: note = Synthetic
LKDFLENLKRIMQK

SEQ ID NO: 367 - protein, 17 aa, synthetic construct
  REGION 1..17: note = Synthetic
QVLHQVQKLANELLRKL

SEQ ID NO: 368 - protein, 12 aa, synthetic construct
  REGION 1..12: note = Synthetic
CHRACGSCCAKC

SEQ ID NO: 369 - protein, 29 aa, synthetic construct
  REGION 1..29: note = Synthetic
QCLANGSKCYSHDVCCTKRCHNYAKKCVT

SEQ ID NO: 370 - protein, 18 aa, synthetic construct
  REGION 1..18: note = Synthetic
KSATTFIEKLTTFIRKAS

SEQ ID NO: 371 - protein, 23 aa, synthetic construct
  REGION 1..23: note = Synthetic
KGYYKGCKKCCSYAGQAMDKVTE

SEQ ID NO: 372 - protein, 20 aa, synthetic construct
  REGION 1..20: note = Synthetic
ILANFQRFLETAYRALRHLA

SEQ ID NO: 373 - protein, 16 aa, synthetic construct
  REGION 1..16: note = Synthetic
EGWSTLMRTVHSVIKR

SEQ ID NO: 374 - protein, 15 aa, synthetic construct
  REGION 1..15: note = Synthetic
DLSSVAKTLIHRLHK

SEQ ID NO: 375 - protein, 25 aa, synthetic construct
  REGION 1..25: note = Synthetic
YGCCRKGYNGCKRCCSYAGEAMDKV

SEQ ID NO: 376 - protein, 25 aa, synthetic construct
  REGION 1..25: note = Synthetic
YGCCRKGYNGCKRCCSYAGEAMDKV

SEQ ID NO: 377 - protein, 25 aa, synthetic construct
  REGION 1..25: note = Synthetic
YGCCRKGYNGCKRCCSYAGEAMDKV

SEQ ID NO: 378 - protein, 12 aa, synthetic construct
  REGION 1..12: note = Synthetic
VRKIYQAAKYLP

SEQ ID NO: 379 - protein, 16 aa, synthetic construct
  REGION 1..16: note = Synthetic
ASQLLKVLHKIWTQVP

SEQ ID NO: 380 - protein, 27 aa, synthetic construct
  REGION 1..27: note = Synthetic
VALVTGAGRGIGRSIAKTLAKSVSHVL

SEQ ID NO: 381 - protein, 17 aa, synthetic construct
  REGION 1..17: note = Synthetic
RWSSGFHKVFAEGTKLI

SEQ ID NO: 382 - protein, 17 aa, synthetic construct
  REGION 1..17: note = Synthetic
KEFLERLKSLIQRMIHQ

SEQ ID NO: 383 - protein, 15 aa, synthetic construct
  REGION 1..15: note = Synthetic
KLSNMLRNLMHLVNQ

SEQ ID NO: 384 - protein, 16 aa, synthetic construct
  REGION 1..16: note = Synthetic
RVIKCIDHICQYARNL

SEQ ID NO: 385 - protein, 16 aa, synthetic construct
  REGION 1..16: note = Synthetic
RVIKCIDHICQYARNL

SEQ ID NO: 386 - protein, 17 aa, synthetic construct
  REGION 1..17: note = Synthetic
KEFLERFKSLLQKMIHQ

SEQ ID NO: 387 - protein, 17 aa, synthetic construct
  REGION 1..17: note = Synthetic
KEFLERFKSLLQKMIHQ

SEQ ID NO: 388 - protein, 17 aa, synthetic construct
  REGION 1..17: note = Synthetic
KEFLERFKSLLQKMIHQ

SEQ ID NO: 389 - protein, 17 aa, synthetic construct
  REGION 1..17: note = Synthetic
KEFLERFKSLLQKMIHQ

SEQ ID NO: 390 - protein, 17 aa, synthetic construct
  REGION 1..17: note = Synthetic
KEFLERFKSLLQKMIHQ

SEQ ID NO: 391 - protein, 17 aa, synthetic construct
  REGION 1..17: note = Synthetic
KEFLERFKSLLQKMIHQ

SEQ ID NO: 392 - protein, 17 aa, synthetic construct
  REGION 1..17: note = Synthetic
KEFLERFKSLLQKMIHQ

SEQ ID NO: 393 - protein, 17 aa, synthetic construct
  REGION 1..17: note = Synthetic
KEFLERFKSLLQKMIHQ

SEQ ID NO: 394 - protein, 17 aa, synthetic construct
  REGION 1..17: note = Synthetic
KEFLERLKSLIQKMIHQ

SEQ ID NO: 395 - protein, 17 aa, synthetic construct
  REGION 1..17: note = Synthetic
KEFLERLKSLIQKMIHQ

SEQ ID NO: 396 - protein, 17 aa, synthetic construct
  REGION 1..17: note = Synthetic
HMLRDLRDAFSRVKTFF

SEQ ID NO: 397 - protein, 17 aa, synthetic construct
  REGION 1..17: note = Synthetic
HMLRDLRDAFSRVKTFF

SEQ ID NO: 398 - protein, 17 aa, synthetic construct
  REGION 1..17: note = Synthetic
HMLRDLRDAFSRVKTFF

SEQ ID NO: 399 - protein, 17 aa, synthetic construct
  REGION 1..17: note = Synthetic
KEFLERLKSLLQKMIHQ

SEQ ID NO: 400 - protein, 16 aa, synthetic construct
  REGION 1..16: note = Synthetic
KKAASVIQKILKDFGL

SEQ ID NO: 401 - protein, 16 aa, synthetic construct
  REGION 1..16: note = Synthetic
KKAASVIQKILKDFGL

SEQ ID NO: 402 - protein, 15 aa, synthetic construct
  REGION 1..15: note = Synthetic
CMKKGGGHCQAYIGR

SEQ ID NO: 403 - protein, 14 aa, synthetic construct
  REGION 1..14: note = Synthetic
GALKCCKAMCGKVC

SEQ ID NO: 404 - protein, 15 aa, synthetic construct
  REGION 1..15: note = Synthetic
KTLARWAQNAFSKLL

SEQ ID NO: 405 - protein, 15 aa, synthetic construct
  REGION 1..15: note = Synthetic
KTLARWAQNAFSKLL

SEQ ID NO: 406 - protein, 17 aa, synthetic construct
  REGION 1..17: note = Synthetic
KEFLERLKSLLQKMVHQ

SEQ ID NO: 407 - protein, 12 aa, synthetic construct
  REGION 1..12: note = Synthetic
DKVREFFKRIKE

SEQ ID NO: 408 - protein, 15 aa, synthetic construct
  REGION 1..15: note = Synthetic
GKWVDEVCRSLKKYI

SEQ ID NO: 409 - protein, 15 aa, synthetic construct
  REGION 1..15: note = Synthetic
SAMERLNNWLKTFKH

SEQ ID NO: 410 - protein, 32 aa, synthetic construct
  REGION 1..32: note = Synthetic
VVSHIVSQIGDGQLQITTAKKCCHKVHNCCSK

SEQ ID NO: 411 - protein, 18 aa, synthetic construct
  REGION 1..18: note = Synthetic
RRCVNNFDDVFNSVFRKL

SEQ ID NO: 412 - protein, 16 aa, synthetic construct
  REGION 1..16: note = Synthetic
STLRDFLERLKKIMKE

SEQ ID NO: 413 - protein, 16 aa, synthetic construct
  REGION 1..16: note = Synthetic
STLRDFLERLKKIMKE

SEQ ID NO: 414 - protein, 14 aa, synthetic construct
  REGION 1..14: note = Synthetic
LKNLLERLKTIMKE

SEQ ID NO: 415 - protein, 23 aa, synthetic construct
  REGION 1..23: note = Synthetic
SKILRSLQAFLAIAARVFAHGAA

SEQ ID NO: 416 - protein, 23 aa, synthetic construct
  REGION 1..23: note = Synthetic
SKILRSLQAFLAIAARVFAHGAA

SEQ ID NO: 417 - protein, 17 aa, synthetic construct
  REGION 1..17: note = Synthetic
AHLGALLARYIQQARKA

SEQ ID NO: 418 - protein, 13 aa, synthetic construct
  REGION 1..13: note = Synthetic
MKYMGSFLRKAAT

SEQ ID NO: 419 - protein, 13 aa, synthetic construct
  REGION 1..13: note = Synthetic
AVKKYLNSILNGK

SEQ ID NO: 420 - protein, 13 aa, synthetic construct
  REGION 1..13: note = Synthetic
AVKKYLNSILNGK

SEQ ID NO: 421 - protein, 13 aa, synthetic construct
  REGION 1..13: note = Synthetic
AVKKYLNSILNGK

SEQ ID NO: 422 - protein, 13 aa, synthetic construct
  REGION 1..13: note = Synthetic
AVKKYLNSILNGK

SEQ ID NO: 423 - protein, 17 aa, synthetic construct
  REGION 1..17: note = Synthetic
KEYLERLKSLIQKMIHQ

SEQ ID NO: 424 - protein, 15 aa, synthetic construct
  REGION 1..15: note = Synthetic
KNVVEDIKKILQKMW

SEQ ID NO: 425 - protein, 27 aa, synthetic construct
  REGION 1..27: note = Synthetic
QRCNRWCHNGCGNGKGGYYKSMSHGGQ

SEQ ID NO: 426 - protein, 17 aa, synthetic construct
  REGION 1..17: note = Synthetic
REFLERMKSLLQKMIHQ

SEQ ID NO: 427 - protein, 14 aa, synthetic construct
  REGION 1..14: note = Synthetic
KEFLERLKSLIQRV

SEQ ID NO: 428 - protein, 14 aa, synthetic construct
  REGION 1..14: note = Synthetic
EDLYKRYGGFLRRI

SEQ ID NO: 429 - protein, 13 aa, synthetic construct
  REGION 1..13: note = Synthetic
SSVAGVAKKGYRK

SEQ ID NO: 430 - protein, 16 aa, synthetic construct
  REGION 1..16: note = Synthetic
RRLLEAAKEIVSLMHK

SEQ ID NO: 431 - protein, 20 aa, synthetic construct
  REGION 1..20: note = Synthetic
KTLGTAFKTLLHNLWDLLKQ

SEQ ID NO: 432 - protein, 19 aa, synthetic construct
  REGION 1..19: note = Synthetic
LIKRFSTLWRDIWQVASNF

SEQ ID NO: 433 - protein, 14 aa, synthetic construct
  REGION 1..14: note = Synthetic
LKDFLERLKAIMQK

SEQ ID NO: 434 - protein, 15 aa, synthetic construct
  REGION 1..15: note = Synthetic
ANPYQRGCEKINRCR

SEQ ID NO: 435 - protein, 17 aa, synthetic construct
  REGION 1..17: note = Synthetic
CRVARDFLRECMQHLKY

SEQ ID NO: 436 - protein, 12 aa, synthetic construct
  REGION 1..12: note = Synthetic
KTLGKIAEKCDR

SEQ ID NO: 437 - protein, 16 aa, synthetic construct
  REGION 1..16: note = Synthetic
QRCNRWCHNGCGNGKG

SEQ ID NO: 438 - protein, 22 aa, synthetic construct
  REGION 1..22: note = Synthetic
SKAKDAIAGLFTKAKSALKDVL

SEQ ID NO: 439 - protein, 15 aa, synthetic construct
  REGION 1..15: note = Synthetic
KEFLERLKSLIQRMI

SEQ ID NO: 440 - protein, 14 aa, synthetic construct
  REGION 1..14: note = Synthetic
RKAISELIRVMKDL

SEQ ID NO: 441 - protein, 16 aa, synthetic construct
  REGION 1..16: note = Synthetic
KTIQSWLNKFLSCLHI

SEQ ID NO: 442 - protein, 15 aa, synthetic construct
  REGION 1..15: note = Synthetic
MSAIVKVVSNIIRPL

SEQ ID NO: 443 - protein, 17 aa, synthetic construct
  REGION 1..17: note = Synthetic
QEFLNSFSKLMQKLFKN

SEQ ID NO: 444 - protein, 17 aa, synthetic construct
  REGION 1..17: note = Synthetic
QEFLNSFSKLMQKLFKN

SEQ ID NO: 445 - protein, 12 aa, synthetic construct
  REGION 1..12: note = Synthetic
ADKCLRYLLKNI

SEQ ID NO: 446 - protein, 14 aa, synthetic construct
  REGION 1..14: note = Synthetic
FKNCVKNILKDCQT

SEQ ID NO: 447 - protein, 15 aa, synthetic construct
  REGION 1..15: note = Synthetic
LARRMNEVFKEMLRP

SEQ ID NO: 448 - protein, 12 aa, synthetic construct
  REGION 1..12: note = Synthetic
CKWVEKAWKGLL

SEQ ID NO: 449 - protein, 13 aa, synthetic construct
  REGION 1..13: note = Synthetic
ISVAATCAKKIYK

SEQ ID NO: 450 - protein, 16 aa, synthetic construct
  REGION 1..16: note = Synthetic
NELKELVKKASDIIKK

SEQ ID NO: 451 - protein, 15 aa, synthetic construct
  REGION 1..15: note = Synthetic
NIQKCCSNGCGHVCK

SEQ ID NO: 452 - protein, 20 aa, synthetic construct
  REGION 1..20: note = Synthetic
NGLLQRIQSWWKNLFQHGAS

SEQ ID NO: 453 - protein, 16 aa, synthetic construct
  REGION 1..16: note = Synthetic
TTLKDFLENLKRIMQK

SEQ ID NO: 454 - protein, 17 aa, synthetic construct
  REGION 1..17: note = Synthetic
FREIPQCINSICKCMKG

SEQ ID NO: 455 - protein, 16 aa, synthetic construct
  REGION 1..16: note = Synthetic
DALSKLFRIYSNFLRG

SEQ ID NO: 456 - protein, 16 aa, synthetic construct
  REGION 1..16: note = Synthetic
DALSKLFRIYSNFLRG

SEQ ID NO: 457 - protein, 12 aa, synthetic construct
  REGION 1..12: note = Synthetic
GYNAAYNRYFRK

SEQ ID NO: 458 - protein, 12 aa, synthetic construct
  REGION 1..12: note = Synthetic
GYNAAYNRYFRK

SEQ ID NO: 459 - protein, 15 aa, synthetic construct
  REGION 1..15: note = Synthetic
DSIFSKMYNCWRKCA

SEQ ID NO: 460 - protein, 13 aa, synthetic construct
  REGION 1..13: note = Synthetic
FRFLKGYWSKFTD

SEQ ID NO: 461 - protein, 15 aa, synthetic construct
  REGION 1..15: note = Synthetic
QELFSLLKRLINKVN

SEQ ID NO: 462 - protein, 15 aa, synthetic construct
  REGION 1..15: note = Synthetic
QELFSLLKRLINKVN

SEQ ID NO: 463 - protein, 16 aa, synthetic construct
  REGION 1..16: note = Synthetic
KLIDTVIKQLRNLIAT

SEQ ID NO: 464 - protein, 16 aa, synthetic construct
  REGION 1..16: note = Synthetic
LLEKIKTCWNKILSGT

SEQ ID NO: 465 - protein, 21 aa, synthetic construct
  REGION 1..21: note = Synthetic
GGGGGGGGGARRMKGLAKKAM

SEQ ID NO: 466 - protein, 17 aa, synthetic construct
  REGION 1..17: note = Synthetic
AAWFQFFNRFLKYITSL

SEQ ID NO: 467 - protein, 16 aa, synthetic construct
  REGION 1..16: note = Synthetic
TTLKDFLENLKTILKK

SEQ ID NO: 468 - protein, 15 aa, synthetic construct
  REGION 1..15: note = Synthetic
VHPYSRGCSSITRCR

SEQ ID NO: 469 - protein, 17 aa, synthetic construct
  REGION 1..17: note = Synthetic
LQSILELVHRVLRHLAQ

SEQ ID NO: 470 - protein, 17 aa, synthetic construct
  REGION 1..17: note = Synthetic
LQSFLELVHRVLRHLAQ

SEQ ID NO: 471 - protein, 12 aa, synthetic construct
  REGION 1..12: note = Synthetic
CLKSAANAIKGI

SEQ ID NO: 472 - protein, 21 aa, synthetic construct
  REGION 1..21: note = Synthetic
SVYAQLSSVARTMIKRLEHFI

SEQ ID NO: 473 - protein, 11 aa, synthetic construct
  REGION 1..11: note = Synthetic
AVKKYLNSILN

SEQ ID NO: 474 - protein, 11 aa, synthetic construct
  REGION 1..11: note = Synthetic
AVKKYLNSILN

SEQ ID NO: 475 - protein, 11 aa, synthetic construct
  REGION 1..11: note = Synthetic
AVKKYLNSILN

SEQ ID NO: 476 - protein, 11 aa, synthetic construct
  REGION 1..11: note = Synthetic
AVKKYLNSILN

SEQ ID NO: 477 - protein, 15 aa, synthetic construct
  REGION 1..15: note = Synthetic
QVGQILRECAKNLKN

SEQ ID NO: 478 - protein, 14 aa, synthetic construct
  REGION 1..14: note = Synthetic
HKAVNELIRVIHQL

SEQ ID NO: 479 - protein, 33 aa, synthetic construct
  REGION 1..33: note = Synthetic
RLLHGLLHSLLHSFSHKFLDSFMRHMCTVCRNM

SEQ ID NO: 480 - protein, 12 aa, synthetic construct
  REGION 1..12: note = Synthetic
YWIHMLRYVAKT

SEQ ID NO: 481 - protein, 12 aa, synthetic construct
  REGION 1..12: note = Synthetic
AVKKYLAAVLGK

SEQ ID NO: 482 - protein, 12 aa, synthetic construct
  REGION 1..12: note = Synthetic
AVKKYLAAVLGK

SEQ ID NO: 483 - protein, 12 aa, synthetic construct
  REGION 1..12: note = Synthetic
AVKKYLAAVLGK

SEQ ID NO: 484 - protein, 12 aa, synthetic construct
  REGION 1..12: note = Synthetic
AVKKYLAAVLGK

SEQ ID NO: 485 - protein, 12 aa, synthetic construct
  REGION 1..12: note = Synthetic
AVKKYLAAVLGK

SEQ ID NO: 486 - protein, 12 aa, synthetic construct
  REGION 1..12: note = Synthetic
AVKKYLAAVLGK

SEQ ID NO: 487 - protein, 12 aa, synthetic construct
  REGION 1..12: note = Synthetic
AVKKYLAAVLGK

SEQ ID NO: 488 - protein, 12 aa, synthetic construct
  REGION 1..12: note = Synthetic
AVKKYLAAVLGK

SEQ ID NO: 489 - protein, 12 aa, synthetic construct
  REGION 1..12: note = Synthetic
AVKKYLAAVLGK

SEQ ID NO: 490 - protein, 12 aa, synthetic construct
  REGION 1..12: note = Synthetic
LKKFLQFIYYCC

SEQ ID NO: 491 - protein, 15 aa, synthetic construct
  REGION 1..15: note = Synthetic
LSDAKQWIKTMFKNW

SEQ ID NO: 492 - protein, 14 aa, synthetic construct
  REGION 1..14: note = Synthetic
AKGKQMLKEYANKV

SEQ ID NO: 493 - protein, 16 aa, synthetic construct
  REGION 1..16: note = Synthetic
GMFNKAYRKALGQLSA

SEQ ID NO: 494 - protein, 17 aa, synthetic construct
  REGION 1..17: note = Synthetic
GGLSTWKKLLDTILKIP

SEQ ID NO: 495 - protein, 13 aa, synthetic construct
  REGION 1..13: note = Synthetic
CLKNMASSFRNLN

SEQ ID NO: 496 - protein, 13 aa, synthetic construct
  REGION 1..13: note = Synthetic
CLKNMASSFRNLN

SEQ ID NO: 497 - protein, 15 aa, synthetic construct
  REGION 1..15: note = Synthetic
VTCASQALKRGCKSV

SEQ ID NO: 498 - protein, 17 aa, synthetic construct
  REGION 1..17: note = Synthetic
CSSWPHLLREILRAARL

SEQ ID NO: 499 - protein, 15 aa, synthetic construct
  REGION 1..15: note = Synthetic
RKAVSELKKVMNDLL

SEQ ID NO: 500 - protein, 20 aa, synthetic construct
  REGION 1..20: note = Synthetic
GQVRNFGNACEKIVHSCKTG

SEQ ID NO: 501 - protein, 14 aa, synthetic construct
  REGION 1..14: note = Synthetic
AFKSFWQKLFAIFG

SEQ ID NO: 502 - protein, 18 aa, synthetic construct
  REGION 1..18: note = Synthetic
ARLTKLAEQLMEKIKNLC

SEQ ID NO: 503 - protein, 12 aa, synthetic construct
  REGION 1..12: note = Synthetic
GKRYIRGCADTC

SEQ ID NO: 504 - protein, 16 aa, synthetic construct
  REGION 1..16: note = Synthetic
NKYRRGCSAATGCYRF

SEQ ID NO: 505 - protein, 15 aa, synthetic construct
  REGION 1..15: note = Synthetic
NKGMEEFKKIVRTLT

SEQ ID NO: 506 - protein, 14 aa, synthetic construct
  REGION 1..14: note = Synthetic
VATVKNCGKKLLAT

SEQ ID NO: 507 - protein, 17 aa, synthetic construct
  REGION 1..17: note = Synthetic
NMLRDLRDAFSRVKTFF

SEQ ID NO: 508 - protein, 17 aa, synthetic construct
  REGION 1..17: note = Synthetic
NMLRDLRDAFSRVKTFF

SEQ ID NO: 509 - protein, 16 aa, synthetic construct
  REGION 1..16: note = Synthetic
RKLKKYLEALDNFLNF

SEQ ID NO: 510 - protein, 27 aa, synthetic construct
  REGION 1..27: note = Synthetic
KHAHSMITSMLTFVSSVMNFGRSFVKD

SEQ ID NO: 511 - protein, 27 aa, synthetic construct
  REGION 1..27: note = Synthetic
KHAHSMITSMLTFVSSVMNFGRSFVKD

SEQ ID NO: 512 - protein, 12 aa, synthetic construct
  REGION 1..12: note = Synthetic
RAHQVLANLLKM

SEQ ID NO: 513 - protein, 15 aa, synthetic construct
  REGION 1..15: note = Synthetic
QKFLNKIYQYYQTFL

SEQ ID NO: 514 - protein, 12 aa, synthetic construct
  REGION 1..12: note = Synthetic
EKFKRIANSFLQ

SEQ ID NO: 515 - protein, 12 aa, synthetic construct
  REGION 1..12: note = Synthetic
EKFKRIANSFLQ

SEQ ID NO: 516 - protein, 13 aa, synthetic construct
  REGION 1..13: note = Synthetic
RHLARTLLTAARE

SEQ ID NO: 517 - protein, 21 aa, synthetic construct
  REGION 1..21: note = Synthetic
CARLRHVARGIADAQAVLSGL

SEQ ID NO: 518 - protein, 12 aa, synthetic construct
  REGION 1..12: note = Synthetic
RALKKIIKRLCR

SEQ ID NO: 519 - protein, 12 aa, synthetic construct
  REGION 1..12: note = Synthetic
CSRFVQCCRRVW

SEQ ID NO: 520 - protein, 12 aa, synthetic construct
  REGION 1..12: note = Synthetic
CSRFVQCCRRVW

SEQ ID NO: 521 - protein, 27 aa, synthetic construct
  REGION 1..27: note = Synthetic
KKIGRGLKKIGQKIKDFLGNLVPRTES

SEQ ID NO: 522 - protein, 27 aa, synthetic construct
  REGION 1..27: note = Synthetic
EKIGRGLKKIGQKIKDFWGNLVPRTES

SEQ ID NO: 523 - protein, 27 aa, synthetic construct
  REGION 1..27: note = Synthetic
EKIGKEFKRIVQRIKDFLQHLVPRTEA

SEQ ID NO: 524 - protein, 27 aa, synthetic construct
  REGION 1..27: note = Synthetic
EKIGKEFKRIVQRIKDFLQHLVPRTEA

SEQ ID NO: 525 - protein, 27 aa, synthetic construct
  REGION 1..27: note = Synthetic
EKIGKEFKRIVQRIKDFLQHLVPRTEA

SEQ ID NO: 526 - protein, 27 aa, synthetic construct
  REGION 1..27: note = Synthetic
KKIGEEFKRIVQRIKDFLQHLIPRTEA

SEQ ID NO: 527 - protein, 19 aa, synthetic construct
  REGION 1..19: note = Synthetic
RRWAQVVEQILRNLIDLIH

SEQ ID NO: 528 - protein, 14 aa, synthetic construct
  REGION 1..14: note = Synthetic
ARRIGERIKDIFRG

SEQ ID NO: 529 - protein, 13 aa, synthetic construct
  REGION 1..13: note = Synthetic
FIGGIISFFKRLF

SEQ ID NO: 530 - protein, 13 aa, synthetic construct
  REGION 1..13: note = Synthetic
FIGGIISFFKRLF

SEQ ID NO: 531 - protein, 12 aa, synthetic construct
  REGION 1..12: note = Synthetic
IGGIISFFKRLF

SEQ ID NO: 532 - protein, 34 aa, synthetic construct
  REGION 1..34: note = Synthetic
KRFKKFFKKVKKSVKKRLKKIFKKPMVIGVTIPF

SEQ ID NO: 533 - protein, 27 aa, synthetic construct
  REGION 1..27: note = Synthetic
KKIGGGLKKIGQKIKDFLGNLVPRTAS

SEQ ID NO: 534 - protein, 27 aa, synthetic construct
  REGION 1..27: note = Synthetic
EKIARGFKKIGQKINDFLGKLAPRTEA

SEQ ID NO: 535 - protein, 35 aa, synthetic construct
  REGION 1..35: note = Synthetic
VKRFKKFFKKLKNSVKKRVKKFFRKPRVIGVTFPF

SEQ ID NO: 536 - protein, 14 aa, synthetic construct
  REGION 1..14: note = Synthetic
FLKSFAKLIKKVIR

SEQ ID NO: 537 - protein, 14 aa, synthetic construct
  REGION 1..14: note = Synthetic
FLKSFAKLIRKVIR

SEQ ID NO: 538 - protein, 14 aa, synthetic construct
  REGION 1..14: note = Synthetic
FLKSLAKLIKKVIR

SEQ ID NO: 539 - protein, 11 aa, synthetic construct
  REGION 1..11: note = Synthetic
MKNLLDDLFGL

SEQ ID NO: 540 - protein, 14 aa, synthetic construct
  REGION 1..14: note = Synthetic
FLKSFAKLIKKVIR

SEQ ID NO: 541 - protein, 14 aa, synthetic construct
  REGION 1..14: note = Synthetic
FLKSFAKLIKKVIR

SEQ ID NO: 542 - protein, 16 aa, synthetic construct
  REGION 1..16: note = Synthetic
VQQIFQRIIRVLRSTL

SEQ ID NO: 543 - protein, 34 aa, synthetic construct; identical to SEQ ID NO: 532
  REGION 1..34: note = Synthetic

SEQ ID NO: 544 - protein, 34 aa, synthetic construct
  REGION 1..34: note = Synthetic
KRFKKFFKKVKKSVKKRLKKIFKKPMVIGVTFPF

SEQ ID NO: 545 - protein, 32 aa, synthetic construct
  REGION 1..32: note = Synthetic
FSKILRSIAKVFKGVGKVRKQFKTASDLDKNQ

SEQ ID NO: 546 - protein, 33 aa, synthetic construct
  REGION 1..33: note = Synthetic
VFGKILRSIAKVFKGVGKVRKQFKTASDLDKNQ

SEQ ID NO: 547 - protein, 15 aa, synthetic construct
  REGION 1..15: note = Synthetic
MRRCLQLIEKVIRKL

SEQ ID NO: 548 - protein, 11 aa, synthetic construct
  REGION 1..11: note = Synthetic
LAKLVKHIHEY

SEQ ID NO: 549 - protein, 11 aa, synthetic construct
  REGION 1..11: note = Synthetic
LAKLVKHIHEY

SEQ ID NO: 550 - protein, 12 aa, synthetic construct
  REGION 1..12: note = Synthetic
WKAILDAVKKVL

SEQ ID NO: 551 - protein, 35 aa, synthetic construct
  REGION 1..35: note = Synthetic
VKRFKKFFRKLKKSVKKRAKEFFKKPRVIGVSIPF

SEQ ID NO: 552 - protein, 14 aa, synthetic construct
  REGION 1..14: note = Synthetic
FLKSFEKLIKKVIR

SEQ ID NO: 553 - protein, 23 aa, synthetic construct
  REGION 1..23: note = Synthetic
KEFKRIVQRIKDFLQHLVPRTEA

SEQ ID NO: 554 - protein, 23 aa, synthetic construct
  REGION 1..23: note = Synthetic
KEFKRIVQRIKDFLQHLVPRTEA

SEQ ID NO: 555 - protein, 23 aa, synthetic construct
  REGION 1..23: note = Synthetic
KEFKRIVQRIKDFLQHLVPRTEA

SEQ ID NO: 556 - protein, 15 aa, synthetic construct
  REGION 1..15: note = Synthetic
MRRCLQLIDKVIRKL

SEQ ID NO: 557 - protein, 15 aa, synthetic construct
  REGION 1..15: note = Synthetic
MRRCLQLIDKVIRKL

SEQ ID NO: 558 - protein, 34 aa, synthetic construct
  REGION 1..34: note = Synthetic
WFQFFNRFLKYITSLTNTTILGPANFTLPFYSSI

SEQ ID NO: 559 - protein, 15 aa, synthetic construct
  REGION 1..15: note = Synthetic
MRRCLQLIDKVIRKL

SEQ ID NO: 560 - protein, 15 aa, synthetic construct
  REGION 1..15: note = Synthetic
DVFSSIFRNIFNLFR

SEQ ID NO: 561 - protein, 15 aa, synthetic construct
  REGION 1..15: note = Synthetic
MRRCLQLIDKVIRKL

SEQ ID NO: 562 - protein, 26 aa, synthetic construct
  REGION 1..26: note = Synthetic
KIGEEFKRIVQRIKDFLRNLVPRTES

SEQ ID NO: 563 - protein, 23 aa, synthetic construct
  REGION 1..23: note = Synthetic
EEFKRIVQRIKDFLRNLVPRTES

SEQ ID NO: 564 - protein, 35 aa, synthetic construct
  REGION 1..35: note = Synthetic
VKRFKKFFKKLKNSVKKRAKKFFKKPRVIGVSIPF

SEQ ID NO: 565 - protein, 29 aa, synthetic construct
  REGION 1..29: note = Synthetic
VGGLRSLGRKILRAWKKYGPIIVPIIRIG

SEQ ID NO: 566 - protein, 23 aa, synthetic construct
  REGION 1..23: note = Synthetic
EEFKRIVQRIKDFLQHLIPRTEA

SEQ ID NO: 567 - protein, 15 aa, synthetic construct
  REGION 1..15: note = Synthetic
MRKCLQLIDKVIRKL

SEQ ID NO: 568 - protein, 15 aa, synthetic construct
  REGION 1..15: note = Synthetic
MRRCLQLIDKVIRKL

SEQ ID NO: 569 - protein, 15 aa, synthetic construct
  REGION 1..15: note = Synthetic
MRRCLQLIDKVIRKL

SEQ ID NO: 570 - protein, 15 aa, synthetic construct
  REGION 1..15: note = Synthetic
MRRCLQLIDKVIRKL

SEQ ID NO: 571 - protein, 15 aa, synthetic construct
  REGION 1..15: note = Synthetic
MRRCLQLIDKVIRKL

SEQ ID NO: 572 - protein, 13 aa, synthetic construct
  REGION 1..13: note = Synthetic
FVQWFSKFLGRIL

SEQ ID NO: 573 - protein, 30 aa, synthetic construct
  REGION 1..30: note = Synthetic
VRGLRRLGRKIAHGVKKYGPTVLRIIRIAG

SEQ ID NO: 574 - protein, 30 aa, synthetic construct; identical to SEQ ID NO: 573
  REGION 1..30: note = Synthetic

SEQ ID NO: 575 - protein, 15 aa, synthetic construct
  REGION 1..15: note = Synthetic
EFLKSFAKLIKKVIR

SEQ ID NO: 576 - protein, 15 aa, synthetic construct
  REGION 1..15: note = Synthetic
MRRCLQFIDKVIRKL

SEQ ID NO: 577 - protein, 14 aa, synthetic construct
  REGION 1..14: note = Synthetic
FLKSFAKLIKQVIR

SEQ ID NO: 578 - protein, 15 aa, synthetic construct
  REGION 1..15: note = Synthetic
MRRCLQLIDKVIRKL

SEQ ID NO: 579 - protein, 14 aa, synthetic construct
  REGION 1..14: note = Synthetic
FLKSFAKLIKQVIR

SEQ ID NO: 580 - protein, 32 aa, synthetic construct
  REGION 1..32: note = Synthetic
FAKILKSIAKFFKGVGKVRKQFKEASDLDKNQ

SEQ ID NO: 581 - protein, 14 aa, synthetic construct
  REGION 1..14: note = Synthetic
RRCLQLIDKVIRKL

SEQ ID NO: 582 - protein, 14 aa, synthetic construct
  REGION 1..14: note = Synthetic
EFLKSFAKLIKKVI

SEQ ID NO: 583 - protein, 12 aa, synthetic construct
  REGION 1..12: note = Synthetic
LLKIAKGIIKSL

SEQ ID NO: 584 - protein, 15 aa, synthetic construct
  REGION 1..15: note = Synthetic
MRRCLQLIDKVIRKL

SEQ ID NO: 585 - protein, 15 aa, synthetic construct
  REGION 1..15: note = Synthetic
MRRCLQLIDKVVRKL

SEQ ID NO: 586 - protein, 15 aa, synthetic construct
  REGION 1..15: note = Synthetic
EFLKSFAKLIKQVIR

SEQ ID NO: 587 - protein, 15 aa, synthetic construct
  REGION 1..15: note = Synthetic
EFLKSFAKLIKQVIR

SEQ ID NO: 588 - protein, 15 aa, synthetic construct
  REGION 1..15: note = Synthetic
MRRCLQLIDKVMRKL

SEQ ID NO: 589 - protein, 35 aa, synthetic construct
  REGION 1..35: note = Synthetic
VKRFKKFFKKLKNSVKKRAKKFFKKPKVIGVTFPF

SEQ ID NO: 590 - protein, 17 aa, synthetic construct
  REGION 1..17: note = Synthetic
TIIERLYKLWRDWKRKV

SEQ ID NO: 591 - protein, 32 aa, synthetic construct
  REGION 1..32: note = Synthetic
ISKVLRAIAKFFKGVGKARKQFKEASDLDKNQ

SEQ ID NO: 592 - protein, 15 aa, synthetic construct
  REGION 1..15: note = Synthetic
MRRCLQLIDKAIRKI

SEQ ID NO: 593 - protein, 12 aa, synthetic construct
  REGION 1..12: note = Synthetic
FRKIVSTIKNVV

SEQ ID NO: 594 - protein, 39 aa, synthetic construct
  REGION 1..39: note = Synthetic
WLRKLGKKIERIGQHTRDASIQVLGIAQQAANVAATARG

SEQ ID NO: 595 - protein, 39 aa, synthetic construct; identical to SEQ ID NO: 594
  REGION 1..39: note = Synthetic

SEQ ID NO: 596 - protein, 39 aa, synthetic construct; identical to SEQ ID NO: 594
  REGION 1..39: note = Synthetic

SEQ ID NO: 597 - protein, 39 aa, synthetic construct; identical to SEQ ID NO: 594
  REGION 1..39: note = Synthetic

SEQ ID NO: 598 - protein, 15 aa, synthetic construct
  REGION 1..15: note = Synthetic
MRKCLQLVDKVIRKL

SEQ ID NO: 599 - protein, 39 aa, synthetic construct
  REGION 1..39: note = Synthetic
WLKKLGKRIERIGQHTRDATIQGLGIAQQAANVAATARG

SEQ ID NO: 600 - protein, 39 aa, synthetic construct; identical to SEQ ID NO: 599
  REGION 1..39: note = Synthetic

SEQ ID NO: 601 - protein, 39 aa, synthetic construct; identical to SEQ ID NO: 599
  REGION 1..39: note = Synthetic

SEQ ID NO: 602 - protein, 39 aa, synthetic construct; identical to SEQ ID NO: 599
  REGION 1..39: note = Synthetic

SEQ ID NO: 603 - protein, 39 aa, synthetic construct; identical to SEQ ID NO: 599
  REGION 1..39: note = Synthetic

SEQ ID NO: 604 - protein, 39 aa, synthetic construct; identical to SEQ ID NO: 599
  REGION 1..39: note = Synthetic

SEQ ID NO: 605 - protein, 39 aa, synthetic construct; identical to SEQ ID NO: 599
  REGION 1..39: note = Synthetic

SEQ ID NO: 606 - protein, 39 aa, synthetic construct; identical to SEQ ID NO: 599
  REGION 1..39: note = Synthetic

SEQ ID NO: 607 - protein, 39 aa, synthetic construct; identical to SEQ ID NO: 599
  REGION 1..39: note = Synthetic

SEQ ID NO: 608 - protein, 13 aa, synthetic construct
  REGION 1..13: note = Synthetic
FIGGIISFIKKLF

SEQ ID NO: 609 - protein, 13 aa, synthetic construct
  REGION 1..13: note = Synthetic
FIGGIISFIKKLF

SEQ ID NO: 610 - protein, 13 aa, synthetic construct
  REGION 1..13: note = Synthetic
FIGGIISLIKKLF

SEQ ID NO: 611 - protein, 14 aa, synthetic construct
  REGION 1..14: note = Synthetic
EFLKSFAKLIQKVI

SEQ ID NO: 612 - protein, 15 aa, synthetic construct
  REGION 1..15: note = Synthetic
MRRCLQLVDKVIRKL

SEQ ID NO: 613 - protein, 36 aa, synthetic construct
  REGION 1..36: note = Synthetic
RRFKKFLKKVEGAGRRVANAAQKGLPLAAGVKGLVG

SEQ ID NO: 614 - protein, 14 aa, synthetic construct
  REGION 1..14: note = Synthetic
FLKSFAKLIQQVIR

SEQ ID NO: 615 - protein, 28 aa, synthetic construct
  REGION 1..28: note = Synthetic
FFGKMKEYFKKFGASFKRRFANLKKRLG

SEQ ID NO: 616 - protein, 15 aa, synthetic construct
  REGION 1..15: note = Synthetic
MRRCLQLIDKAIKKL

SEQ ID NO: 617 - protein, 11 aa, synthetic construct
  REGION 1..11: note = Synthetic
LKKWFKRCPKY

SEQ ID NO: 618 - protein, 23 aa, synthetic construct
  REGION 1..23: note = Synthetic
FVKRLLDEIKTCWNKILRGAKKH

SEQ ID NO: 619 - protein, 15 aa, synthetic construct
  REGION 1..15: note = Synthetic
EFLKSFEKLIQKVIR

SEQ ID NO: 620 - protein, 15 aa, synthetic construct
  REGION 1..15: note = Synthetic
MRRCLQFVDKVIKRL

SEQ ID NO: 621 - protein, 15 aa, synthetic construct
  REGION 1..15: note = Synthetic
EFLQSFGKLINKVIR

SEQ ID NO: 622 - protein, 27 aa, synthetic construct
  REGION 1..27: note = Synthetic
EKIGGGLKKVGQKIKDFLGNLVPRTAS

SEQ ID NO: 623 - protein, 27 aa, synthetic construct
  REGION 1..27: note = Synthetic
EKIGGGLKKVGQKIKDFLGNLVPRTAS

SEQ ID NO: 624 - protein, 27 aa, synthetic construct
  REGION 1..27: note = Synthetic
EKIGGGLKKVGQKIKDFLGNLVPRTAS

SEQ ID NO: 625 - protein, 27 aa, synthetic construct
  REGION 1..27: note = Synthetic
EKIGGGLKKVGQKIKDFLGNLVPRTAS

SEQ ID NO: 626 - protein, 23 aa, synthetic construct
  REGION 1..23: note = Synthetic
FVKRLLDEIKTCWNKILRGAKKH

SEQ ID NO: 627 - protein, 34 aa, synthetic construct
  REGION 1..34: note = Synthetic
LKKLGKKIEKAGKRVFNAVQKGLPVAAGVQALGR

SEQ ID NO: 628 - protein, 13 aa, synthetic construct
  REGION 1..13: note = Synthetic
LKGLIKKVASLLN

SEQ ID NO: 629 - protein, 14 aa, synthetic construct
  REGION 1..14: note = Synthetic
FLKSFAKLIQQVIR

SEQ ID NO: 630 - protein, 11 aa, synthetic construct
  REGION 1..11: note = Synthetic
LDDLLSKFPDY

SEQ ID NO: 631 - protein, 27 aa, synthetic construct
  REGION 1..27: note = Synthetic
EKIGEKLKKIGQKIKNFFQKLVPQPEQ

SEQ ID NO: 632 - protein, 38 aa, synthetic construct
  REGION 1..38: note = Synthetic
WLRKIGKKIERVGQHTRDATIQVLGIAQQAANVAATAR

SEQ ID NO: 633 - protein, 31 aa, synthetic construct
  REGION 1..31: note = Synthetic
KFGKRLEKLGRNVFRAAKKALPVIAGYKALG

SEQ ID NO: 634 - protein, 14 aa, synthetic construct
  REGION 1..14: note = Synthetic
FLKSFAKLIQQVIR

SEQ ID NO: 635 - protein, 14 aa, synthetic construct
  REGION 1..14: note = Synthetic
EFLKSFAKLIQKVI

SEQ ID NO: 636 - protein, 39 aa, synthetic construct
  REGION 1..39: note = Synthetic
WLKKIGKKIERIGQHTRDATIQGLGIAQQAANVAATARG

SEQ ID NO: 637 - protein, 15 aa, synthetic construct
  REGION 1..15: note = Synthetic
MRRCLQLIDKAIRKL

SEQ ID NO: 638 - protein, 15 aa, synthetic construct
  REGION 1..15: note = Synthetic
MRRCLQLIDKVARKL

SEQ ID NO: 639 - protein, 24 aa, synthetic construct
  REGION 1..24: note = Synthetic
CCDLIRKCWHDIKECWKRCHGGKV

SEQ ID NO: 640 - protein, 14 aa, synthetic construct
  REGION 1..14: note = Synthetic
FLKSFANLIKQVIR

SEQ ID NO: 641 - protein, 21 aa, synthetic construct
  REGION 1..21: note = Synthetic
FLKRLLREIKTCWNKILKGSI

SEQ ID NO: 642 - protein, 21 aa, synthetic construct
  REGION 1..21: note = Synthetic
FLKRLLREIKTCWNKILKGSI

SEQ ID NO: 643 - protein, 23 aa, synthetic construct
  REGION 1..23: note = Synthetic
FVKRLLDEIKTCWNKILRGAKKH

SEQ ID NO: 644 - protein, 15 aa, synthetic construct
  REGION 1..15: note = Synthetic
EFLKSFAKLIQQVIR

SEQ ID NO: 645 - protein, 14 aa, synthetic construct
  REGION 1..14: note = Synthetic
FLQSFAKLIKQVIR

SEQ ID NO: 646 - protein, 11 aa, synthetic construct
  REGION 1..11: note = Synthetic
SLLSLIRKLIT

SEQ ID NO: 647 - protein, 26 aa, synthetic construct
  REGION 1..26: note = Synthetic
FFKWISKFIRRLSKCGIKSITSKAYK

SEQ ID NO: 648 - protein, 27 aa, synthetic construct
  REGION 1..27: note = Synthetic
EKIEGGLKKLVQKIKDFFGKFAPRTES

SEQ ID NO: 649 - protein, 23 aa, synthetic construct
  REGION 1..23: note = Synthetic
FVKRLLDEIKTCWNKILRGAKKH

SEQ ID NO: 650 - protein, 35 aa, synthetic construct
  REGION 1..35: note = Synthetic
KIFKKIEKMGRNIRDGIVKAGPAIEVLGSAKAIGK

SEQ ID NO: 651 - protein, 28 aa, synthetic construct
  REGION 1..28: note = Synthetic
GRFGRFLRKIRRFRPKVTITIQGSARFG

SEQ ID NO: 652 - protein, 13 aa, synthetic construct
  REGION 1..13: note = Synthetic
WKKLLDTILKIPV

SEQ ID NO: 653 - protein, 15 aa, synthetic construct
  REGION 1..15: note = Synthetic
FLKSFAKLIQKVIKS

SEQ ID NO: 654 - protein, 16 aa, synthetic construct
  REGION 1..16: note = Synthetic
IRRCLQLIDKAVRKLY

SEQ ID NO: 655 - protein, 26 aa, synthetic construct
  REGION 1..26: note = Synthetic
LDALHDLMSSVIRLLKNINKRFGCAL

SEQ ID NO: 656 - protein, 21 aa, synthetic construct
  REGION 1..21: note = Synthetic
FLKRLLREIKTCWNKILKGSI

SEQ ID NO: 657 - protein, 21 aa, synthetic construct
  REGION 1..21: note = Synthetic
FLKRLLREIKTCWNKILKGSI

SEQ ID NO: 658 - protein, 21 aa, synthetic construct
  REGION 1..21: note = Synthetic
FLKRLLREIKTCWNKILKGSI

SEQ ID NO: 659 - protein, 25 aa, synthetic construct
  REGION 1..25: note = Synthetic
ILANIHKIIKAYQRSIIKLPVTKGL

SEQ ID NO: 660 - protein, 21 aa, synthetic construct
  REGION 1..21: note = Synthetic
IHHIFRGIVHAGRSIGRFLTG

SEQ ID NO: 661 - protein, 28 aa, synthetic construct
  REGION 1..28: note = Synthetic
KPLKEFLERLKSLIQKMIHQHLSRTHGI

SEQ ID NO: 662 - protein, 22 aa, synthetic construct
  REGION 1..22: note = Synthetic
KNLKEFLERLKSLIQKMIHQHL

SEQ ID NO: 663 - protein, 15 aa, synthetic construct
  REGION 1..15: note = Synthetic
WKKIASIGKEVLKAL

SEQ ID NO: 664 - protein, 39 aa, synthetic construct
  REGION 1..39: note = Synthetic
WLKKIGKKIERVGQHTRDATIQTIAVAQQAANVAATARG

SEQ ID NO: 665 - protein, 39 aa, synthetic construct
  REGION 1..39: note = Synthetic
WLKKIGKKIERVGQHTRDATIQGLGIAQQAANVAATARG

SEQ ID NO: 666 - protein, 39 aa, synthetic construct
  REGION 1..39: note = Synthetic
WLKKIGKKIERVGQHTRDATIQGLGVAQQAANVAATARG

SEQ ID NO: 667 - protein, 39 aa, synthetic construct; identical to SEQ ID NO: 666
  REGION 1..39: note = Synthetic

SEQ ID NO: 668 - protein, 39 aa, synthetic construct; identical to SEQ ID NO: 665
  REGION 1..39: note = Synthetic

SEQ ID NO: 669 - protein, 39 aa, synthetic construct; identical to SEQ ID NO: 665
  REGION 1..39: note = Synthetic

SEQ ID NO: 670 - protein, 39 aa, synthetic construct
  REGION 1..39: note = Synthetic
WLKKIGKKIERVGQHTRDATIQVIGVAQQAANVAATARG

SEQ ID NO: 671 - protein, 23 aa, synthetic construct
  REGION 1..23: note = Synthetic
ARSWKSMAKKLKEYMEKLKQRAG

SEQ ID NO: 672 - protein, 14 aa, synthetic construct
  REGION 1..14: note = Synthetic
LRSCWNKFEKIISR

SEQ ID NO: 673 - protein, 26 aa, synthetic construct
  REGION 1..26: note = Synthetic
LFQKIKRWWKRIFDREASRSARALRR

SEQ ID NO: 674 - protein, 12 aa, synthetic construct
  REGION 1..12: note = Synthetic
FRKIATVVKNLV

SEQ ID NO: 675 - protein, 23 aa, synthetic construct
  REGION 1..23: note = Synthetic
FVKRLLDEIKTCWNKILRGAKKH

SEQ ID NO: 676 - protein, 12 aa, synthetic construct
  REGION 1..12: note = Synthetic
WKALLDAAKKVL

SEQ ID NO: 677 - protein, 14 aa, synthetic construct
  REGION 1..14: note = Synthetic
LRSCWNKFEKLISR

SEQ ID NO: 678 - protein, 14 aa, synthetic construct
  REGION 1..14: note = Synthetic
KEFLQSFSKLMKKV

SEQ ID NO: 679 - protein, 11 aa, synthetic construct
  REGION 1..11: note = Synthetic
NALGGLIKKIG

SEQ ID NO: 680 - protein, 11 aa, synthetic construct
  REGION 1..11: note = Synthetic
NALGGLIKKIG

SEQ ID NO: 681 - protein, 33 aa, synthetic construct
  REGION 1..33: note = Synthetic
KIFKKIEKVGRNIRNGIIKAGPAVAVLGEAKAL

SEQ ID NO: 682 - protein, 20 aa, synthetic construct
  REGION 1..20: note = Synthetic
VKRFIEKLRTFLRKLSRGAK

SEQ ID NO: 683 - protein, 35 aa, synthetic construct
  REGION 1..35: note = Synthetic
KVFKKIEKMGRNIRDGIVKAGPAIEVLGSAKALGK

SEQ ID NO: 684 - protein, 12 aa, synthetic construct
  REGION 1..12: note = Synthetic
LGKFCDEIKRIV

SEQ ID NO: 685 - protein, 38 aa, synthetic construct
  REGION 1..38: note = Synthetic
IKAIKTVGKAVGKGLRAINIASTANDVFNFLKPKKRKH

SEQ ID NO: 686 - protein, 38 aa, synthetic construct; identical to SEQ ID NO: 685
  REGION 1..38: note = Synthetic

SEQ ID NO: 687 - protein, 15 aa, synthetic construct
  REGION 1..15: note = Synthetic
IKDILAKLVKVLGHV

SEQ ID NO: 688 - protein, 21 aa, synthetic construct
  REGION 1..21: note = Synthetic
FLKRLLREIKTCWNKILNSSI

SEQ ID NO: 689 - protein, 13 aa, synthetic construct
  REGION 1..13: note = Synthetic
LKGIFKKVASLLT

SEQ ID NO: 690 - protein, 35 aa, synthetic construct
  REGION 1..35: note = Synthetic
KLFKKIEKVGRNVRDGLIKAGPAIAVIGQAKSLGK

SEQ ID NO: 691 - protein, 14 aa, synthetic construct
  REGION 1..14: note = Synthetic
KEFLERLKSLIQRV

SEQ ID NO: 692 - protein, 14 aa, synthetic construct
  REGION 1..14: note = Synthetic
DLIRKAVSVIKNIV

SEQ ID NO: 693 - protein, 17 aa, synthetic construct
  REGION 1..17: note = Synthetic
WNQILSNLHSIMQQMIN

SEQ ID NO: 694 - protein, 23 aa, synthetic construct
  REGION 1..23: note = Synthetic
KPIKEFLERLKSLIQKMIHQRLS

SEQ ID NO: 695 - protein, 23 aa, synthetic construct
  REGION 1..23: note = Synthetic
KPIKEFLERLKSLIQKMIHQRLS

SEQ ID NO: 696 - protein, 23 aa, synthetic construct
  REGION 1..23: note = Synthetic
FVKRLLDEIKTCWNKILRGAKKH

SEQ ID NO: 697 - protein, 34 aa, synthetic construct
  REGION 1..34: note = Synthetic
KVFKKIEKMGRNIRNGIVKAGPAIAVLGEAKALG

SEQ ID NO: 698 - protein, 26 aa, synthetic construct
  REGION 1..26: note = Synthetic
EELFQQYGEVMQKIMQDLLMDTPAKE

SEQ ID NO: 699 - protein, 13 aa, synthetic construct
  REGION 1..13: note = Synthetic
LKGLFKKVASLLT

SEQ ID NO: 700 - protein, 13 aa, synthetic construct
  REGION 1..13: note = Synthetic
IGNVLGGLLKNLG

SEQ ID NO: 701 - protein, 39 aa, synthetic construct
  REGION 1..39: note = Synthetic
WIRDFGKRIERVGQHTRDATIQTIAVAQQAANVAATLKG

SEQ ID NO: 702 - protein, 19 aa, synthetic construct
  REGION 1..19: note = Synthetic
LLQKIKTCWNKILRGIKEH

SEQ ID NO: 703 - protein, 25 aa, synthetic construct
  REGION 1..25: note = Synthetic
MRFMRRLVRNLQYLLLPITSSLLFI

SEQ ID NO: 704 - protein, 19 aa, synthetic construct
  REGION 1..19: note = Synthetic
LLQKIKTCWNKILRGIKEH

SEQ ID NO: 705 - protein, 12 aa, synthetic construct
  REGION 1..12: note = Synthetic
LKSIVSWAKKVL

SEQ ID NO: 706 - protein, 31 aa, synthetic construct
  REGION 1..31: note = Synthetic
QQLRRLFDAARNLPNICNIPNIGACPFRAWP

SEQ ID NO: 707 - protein, 12 aa, synthetic construct
  REGION 1..12: note = Synthetic
LKAIAALVKKVL

SEQ ID NO: 708 - protein, 27 aa, synthetic construct
  REGION 1..27: note = Synthetic
LFQKIKRWWKRIFEHEASRSARRLRAV

SEQ ID NO: 709 - protein, 27 aa, synthetic construct
  REGION 1..27: note = Synthetic
LFQKIKRWWKRIFEHEASRSARRLRAV

SEQ ID NO: 710 - protein, 27 aa, synthetic construct
  REGION 1..27: note = Synthetic
LFQKIKRWWKRIFEHEASRSARRLRAV

SEQ ID NO: 711 - protein, 25 aa, synthetic construct
  REGION 1..25: note = Synthetic
ELLKAMDYILSRWGKYLKNRNKNNS

SEQ ID NO: 712 - protein, 23 aa, synthetic construct
  REGION 1..23: note = Synthetic
KPIKEFLERLKSLIQKMIHQHLS

SEQ ID NO: 713 - protein, 23 aa, synthetic construct
  REGION 1..23: note = Synthetic
KPIKEFLERLKSLIQKMIHQHLS

SEQ ID NO: 714 - protein, 20 aa, synthetic construct
  REGION 1..20: note = Synthetic
CNHMPNLLTRCLQRLKRLKS

SEQ ID NO: 715 - protein, 12 aa, synthetic construct
  REGION 1..12: note = Synthetic
FKKIATVVKNLV

SEQ ID NO: 716 - protein, 12 aa, synthetic construct
  REGION 1..12: note = Synthetic
YIQLIRKILKSG

SEQ ID NO: 717 - protein, 12 aa, synthetic construct
  REGION 1..12: note = Synthetic
WKGIAAMAKKLL

SEQ ID NO: 718 - protein, 12 aa, synthetic construct
  REGION 1..12: note = Synthetic
WKGIAAMAKKLL

SEQ ID NO: 719 - protein, 13 aa, synthetic construct
  REGION 1..13: note = Synthetic
WKKIKSIIKAAMN

SEQ ID NO: 720 - protein, 23 aa, synthetic construct
  REGION 1..23: note = Synthetic
KEFKRIVQRIKDFLQHLVPRTEA

SEQ ID NO: 721 - protein, 34 aa, synthetic construct
  REGION 1..34: note = Synthetic
KVFKKIEKVGRNVRDGIIKAGPAIGVLGQAKALG

SEQ ID NO: 722 - protein, 33 aa, synthetic construct
  REGION 1..33: note = Synthetic
KIFKKIEKVGQNIRDGIVKAGPAVAVVGQAATI

SEQ ID NO: 723 - protein, 26 aa, synthetic construct
  REGION 1..26: note = Synthetic
VKELRRILDDWGEACKGCAEKSDFIR

SEQ ID NO: 724 - protein, 23 aa, synthetic construct
  REGION 1..23: note = Synthetic
FLKKLLQKIKTCWNKILRGIKEN

SEQ ID NO: 725 - protein, 15 aa, synthetic construct
  REGION 1..15: note = Synthetic
WKKIAEVGGKILSSL

SEQ ID NO: 726 - protein, 34 aa, synthetic construct
  REGION 1..34: note = Synthetic
LKKFGKKLEGVGKRVFKASEKALPVVTGFKALGK

SEQ ID NO: 727 - protein, 34 aa, synthetic construct
  REGION 1..34: note = Synthetic
LKKFGKKLEGVGKRVFKASEKALPVAVGIKALGK

SEQ ID NO: 728 - protein, 35 aa, synthetic construct
  REGION 1..35: note = Synthetic
KVFKKIEKVGRNIRDGVIKAGPAIAVVGQAKALGK

SEQ ID NO: 729 - protein, 11 aa, synthetic construct
  REGION 1..11: note = Synthetic
NALGGLIKKIG

SEQ ID NO: 730 - protein, 11 aa, synthetic construct
  REGION 1..11: note = Synthetic
NALGGLIKKIG

SEQ ID NO: 731 - protein, 11 aa, synthetic construct
  REGION 1..11: note = Synthetic
NALGGLIKKIG

SEQ ID NO: 732 - protein, 11 aa, synthetic construct
  REGION 1..11: note = Synthetic
NALGGLIKKIG

SEQ ID NO: 733 - protein, 11 aa, synthetic construct
  REGION 1..11: note = Synthetic
NALGGLIKKIG

SEQ ID NO: 734 - protein, 11 aa, synthetic construct
  REGION 1..11: note = Synthetic
NALGGLIKKIG

SEQ ID NO: 735 - protein, 11 aa, synthetic construct
  REGION 1..11: note = Synthetic
NALGGLIKKIG

SEQ ID NO: 736 - protein, 11 aa, synthetic construct
  REGION 1..11: note = Synthetic
NALGGLIKKIG

SEQ ID NO: 737 - protein, 11 aa, synthetic construct
  REGION 1..11: note = Synthetic
NALGGLIKKIG

SEQ ID NO: 738 - protein, 11 aa, synthetic construct
  REGION 1..11: note = Synthetic
NALGGLIKKIG

SEQ ID NO: 739 - protein, 11 aa, synthetic construct
  REGION 1..11: note = Synthetic
NALGGLIKKIG

SEQ ID NO: 740 - protein, 11 aa, synthetic construct
  REGION 1..11: note = Synthetic
NALGGLIKKIG

SEQ ID NO: 741 - protein, 27 aa, synthetic construct
  REGION 1..27: note = Synthetic
LWQRFLRWWNRLFHVSSNRLLREGGKK

SEQ ID NO: 742 - protein, 27 aa, synthetic construct
  REGION 1..27: note = Synthetic
LWQRFLRWWNRLFHVSSNRLLREGGKK

SEQ ID NO: 743 - protein, 11 aa, synthetic construct
  REGION 1..11: note = Synthetic
NAIGGLIKKIG

SEQ ID NO: 744 - protein, 39 aa, synthetic construct
  REGION 1..39: note = Synthetic
WLKKIGKKIERVGQNTRDATVKGLEVAQQAANVAATVRG

SEQ ID NO: 745 - protein, 27 aa, synthetic construct
  REGION 1..27: note = Synthetic
LFQKIKRWWKRIFEHEASRSARRLRAV

SEQ ID NO: 746 - protein, 27 aa, synthetic construct
  REGION 1..27: note = Synthetic
LFQKIKRWWKRIFEHEASRSARRLRAV

SEQ ID NO: 747 - protein, 12 aa, synthetic construct
  REGION 1..12: note = Synthetic
IAGGIASLVKNL

SEQ ID NO: 748 - protein, 34 aa, synthetic construct
  REGION 1..34: note = Synthetic
LKKLGKKLEGVGKRVFKASEKALPVAVGIKALGK

SEQ ID NO: 749 - protein, 11 aa, synthetic construct
  REGION 1..11: note = Synthetic
KYIKNLGKKIG

SEQ ID NO: 750 - protein, 19 aa, synthetic construct
  REGION 1..19: note = Synthetic
SIKSLLQKLIEFMKSLFKM

SEQ ID NO: 751 - protein, 37 aa, synthetic construct
  REGION 1..37: note = Synthetic
LKSFARVLKKVLPKAAKAGKALAKSMADENAIRQQNQ

SEQ ID NO: 752 - protein, 16 aa, synthetic construct
  REGION 1..16: note = Synthetic
KLIDTVIKQLRNLIAT

SEQ ID NO: 753 - protein, 24 aa, synthetic construct
  REGION 1..24: note = Synthetic
KLIKTFLEFISLLINSFAMGDLKY

SEQ ID NO: 754 - protein, 20 aa, synthetic construct
  REGION 1..20: note = Synthetic
FLKTLLQKIKTCWNKILRGH

SEQ ID NO: 755 - protein, 33 aa, synthetic construct
  REGION 1..33: note = Synthetic
LKKLGKKIEGAGKRVFKAAEKALPVVAGVKALG

SEQ ID NO: 756 - protein, 12 aa, synthetic construct
  REGION 1..12: note = Synthetic
FRKIATVVKNVV

SEQ ID NO: 757 - protein, 39 aa, synthetic construct
  REGION 1..39: note = Synthetic
WLKKIGKKIERVGQHTRDATIQTIGVAQQAANVAATLKG

SEQ ID NO: 758 - protein, 14 aa, synthetic construct
  REGION 1..14: note = Synthetic
AVDTLARLMHRALQ

SEQ ID NO: 759 - protein, 31 aa, synthetic construct
  REGION 1..31: note = Synthetic
LWKTIIKGAGKMIGSLAKNLLGSQAQPESEQ

SEQ ID NO: 760 - protein, 22 aa, synthetic construct
  REGION 1..22: note = Synthetic
ALSRLKAALQDMLRQLDRNPGC

SEQ ID NO: 761 - protein, 22 aa, synthetic construct
  REGION 1..22: note = Synthetic
ALSRLKAALQDMLRQLDRNPGC

SEQ ID NO: 762 - protein, 23 aa, synthetic construct
  REGION 1..23: note = Synthetic
KEFKRIVQRIKDFLQHLVPRTEA

SEQ ID NO: 763 - protein, 26 aa, synthetic construct
  REGION 1..26: note = Synthetic
NWRKILGKIAKVAAGLLGSMLAGYQV

SEQ ID NO: 764 - protein, 34 aa, synthetic construct
  REGION 1..34: note = Synthetic
WVTDLMNLMDRLIKKCHETNFKAKHCKKLKNNSP

SEQ ID NO: 765 - protein, 15 aa, synthetic construct
  REGION 1..15: note = Synthetic
FKNLIRKCVDVARKV

SEQ ID NO: 766 - protein, 35 aa, synthetic construct
  REGION 1..35: note = Synthetic
KIFKKIERVGQNVRDGIIKAGPAIQVLGTAKALGK

SEQ ID NO: 767 - protein, 13 aa, synthetic construct
  REGION 1..13: note = Synthetic
CYNGLAKCCRPFW

SEQ ID NO: 768 - protein, 34 aa, synthetic construct
  REGION 1..34: note = Synthetic
IDEIKSFIRSCIDEFDKLHTDLYVKYEKISSEQK

SEQ ID NO: 769 - protein, 11 aa, synthetic construct
  REGION 1..11: note = Synthetic
NALGGLIKKIG

SEQ ID NO: 770 - protein, 11 aa, synthetic construct
  REGION 1..11: note = Synthetic
NALGGLIKKIG

SEQ ID NO: 771 - protein, 23 aa, synthetic construct
  REGION 1..23: note = Synthetic
KNVKKFIEKLRTFIRKLSRDARV

SEQ ID NO: 772 - protein, 21 aa, synthetic construct
  REGION 1..21: note = Synthetic
FLNALKNFAKTAGKRLKSLLN

SEQ ID NO: 773 - protein, 13 aa, synthetic construct
  REGION 1..13: note = Synthetic
RLWELINSLLQQE

SEQ ID NO: 774 - protein, 12 aa, synthetic construct
  REGION 1..12: note = Synthetic
KTLGKIAEKCDR

SEQ ID NO: 775 - protein, 14 aa, synthetic construct
  REGION 1..14: note = Synthetic
RRCLQLAHKVIRKL

SEQ ID NO: 776 - protein, 29 aa, synthetic construct
  REGION 1..29: note = Synthetic
LFHTFEKFVKDMVKSATGSGSRRRRKKKP

SEQ ID NO: 777 - protein, 27 aa, synthetic construct
  REGION 1..27: note = Synthetic
LWQRFLRWWNRLFHVSSNRLLREGGKK

SEQ ID NO: 778 - protein, 36 aa, synthetic construct
  REGION 1..36: note = Synthetic
KFFKKIEKVGQNIRDGIIKAGPAVAVVGQAASITGK

SEQ ID NO: 779 - protein, 39 aa, synthetic construct
  REGION 1..39: note = Synthetic
WLKKIGKKIERVGQHTRDATIQGLGVAQQAPNVAATARG

SEQ ID NO: 780 - protein, 13 aa, synthetic construct
  REGION 1..13: note = Synthetic
FLGTLINLAKKIM

SEQ ID NO: 781 - protein, 34 aa, synthetic construct
  REGION 1..34: note = Synthetic
LKKLGKKLEGVGKRVFKASEKALPVLTGYKAIGK

SEQ ID NO: 782 - protein, 34 aa, synthetic construct; identical to SEQ ID NO: 781
  REGION 1..34: note = Synthetic

SEQ ID NO: 783 - protein, 35 aa, synthetic construct
  REGION 1..35: note = Synthetic
KFFKKIERVGQNVRDGLIKAGPAIQVLGAAKALGK

SEQ ID NO: 784 - protein, 24 aa, synthetic construct
  REGION 1..24: note = Synthetic
GRRLGEKIERIGQKIKDLSEFFQS

SEQ ID NO: 785 - protein, 14 aa, synthetic construct
  REGION 1..14: note = Synthetic
DLIRKAVAAIKNIV

SEQ ID NO: 786 - protein, 13 aa, synthetic construct
  REGION 1..13: note = Synthetic
VGEPLGGLIKKIG

SEQ ID NO: 787 - protein, 23 aa, synthetic construct
  REGION 1..23: note = Synthetic
ARSWASMAKKLKEYMEKLKQRAG

SEQ ID NO: 788 - protein, 30 aa, synthetic construct
  REGION 1..30: note = Synthetic
RALSRAARSIWDALKKISGFSGTSGKKIRY

SEQ ID NO: 789 - protein, 11 aa, synthetic construct
  REGION 1..11: note = Synthetic
NALGGLLKNIG

SEQ ID NO: 790 - protein, 11 aa, synthetic construct
  REGION 1..11: note = Synthetic
NALGGLLKNIG

SEQ ID NO: 791 - protein, 11 aa, synthetic construct
  REGION 1..11: note = Synthetic
NALGGLLKNIG

SEQ ID NO: 792 - protein, 22 aa, synthetic construct
  REGION 1..22: note = Synthetic
RIVDNIISVFRQLCEDCLVFLV

SEQ ID NO: 793 - protein, 35 aa, synthetic construct
  REGION 1..35: note = Synthetic
GFGTILKALAKIAGKVVKKLATKPGATYMLKQNLQ

SEQ ID NO: 794 - protein, 23 aa, synthetic construct
  REGION 1..23: note = Synthetic
ELITFMKNLLDHLRRIYRYRSVN

SEQ ID NO: 795 - protein, 15 aa, synthetic construct
  REGION 1..15: note = Synthetic
ITDILAKLGKVLAHV

SEQ ID NO: 796 - protein, 21 aa, synthetic construct
  REGION 1..21: note = Synthetic
EVAQFVKDLLRHLKRLYRHRV

SEQ ID NO: 797 - protein, 19 aa, synthetic construct
  REGION 1..19: note = Synthetic
LLQKIKTCWNKILRGITEH

SEQ ID NO: 798 - protein, 33 aa, synthetic construct
  REGION 1..33: note = Synthetic
KKLGKKIEKAGKRVFNAAQKGLPVAAGVQALGR

SEQ ID NO: 799 - protein, 12 aa, synthetic construct
  REGION 1..12: note = Synthetic
WKKLLDAAKQIL

SEQ ID NO: 800 - protein, 16 aa, synthetic construct
  REGION 1..16: note = Synthetic
MGKFARRFCKFMCGFC

SEQ ID NO: 801 - protein, 24 aa, synthetic construct
  REGION 1..24: note = Synthetic
EVAQFIKDLLRHLKKRFRDANVKA

SEQ ID NO: 802 - protein, 12 aa, synthetic construct
  REGION 1..12: note = Synthetic
SIVEGIAKAIRE

SEQ ID NO: 803 - protein, 17 aa, synthetic construct
  REGION 1..17: note = Synthetic
VIKTIGGVIGGLLKNLG

SEQ ID NO: 804 - protein, 26 aa, synthetic construct
  REGION 1..26: note = Synthetic
FQRLVREIAQDFKDIQLARRIRGDRA

SEQ ID NO: 805 - protein, 23 aa, synthetic construct
  REGION 1..23: note = Synthetic
KNVKKFIEKLRTFIRKLSRDARV

SEQ ID NO: 806 - protein, 23 aa, synthetic construct
  REGION 1..23: note = Synthetic
KNVKKFIEKLRTFIRKLSRDARV

SEQ ID NO: 807 - protein, 12 aa, synthetic construct
  REGION 1..12: note = Synthetic
LKAIAAFAKKLL

SEQ ID NO: 808 - protein, 18 aa, synthetic construct
  REGION 1..18: note = Synthetic
IIKVITRALRGARRLLKY

SEQ ID NO: 809 - protein, 12 aa, synthetic construct
  REGION 1..12: note = Synthetic
IATGIASLVKNL

SEQ ID NO: 810 - protein, 26 aa, synthetic construct
  REGION 1..26: note = Synthetic
LLRALDTVATCWEKLFALRASASRKS

SEQ ID NO: 811 - protein, 30 aa, synthetic construct
  REGION 1..30: note = Synthetic
RAWLDKLKNLGKVVGKVALGVVQNYLNPRQ

SEQ ID NO: 812 - protein, 11 aa, synthetic construct
  REGION 1..11: note = Synthetic
NALGGLLKNLG

SEQ ID NO: 813 - protein, 12 aa, synthetic construct
  REGION 1..12: note = Synthetic
LKAIAALAKKLL

SEQ ID NO: 814 - protein, 36 aa, synthetic construct
  REGION 1..36: note = Synthetic
KLFKKIEKVGQNIRDGIIKAGPAVAVVGQATQIAKG

SEQ ID NO: 815 - protein, 28 aa, synthetic construct
  REGION 1..28: note = Synthetic
LWQRFLRWWNRLFTGSAANSTRTLRTDN

SEQ ID NO: 816 - protein, 28 aa, synthetic construct
  REGION 1..28: note = Synthetic
LWQRFLRWWNRLFTGSAANSTRTLRTDN

SEQ ID NO: 817 - protein, 28 aa, synthetic construct
  REGION 1..28: note = Synthetic
LWQRFLRWWNRLFTGSAANSTRTLRTDN

SEQ ID NO: 818 - protein, 12 aa, synthetic construct
  REGION 1..12: note = Synthetic
LKALAALAKKIL

SEQ ID NO: 819 - protein, 12 aa, synthetic construct
  REGION 1..12: note = Synthetic
LKALLAVAKKIL

SEQ ID NO: 820 - protein, 35 aa, synthetic construct
  REGION 1..35: note = Synthetic
KVFKKIEKVGRHIRDGVIKAGPAITVVGQATALGK

SEQ ID NO: 821 - protein, 17 aa, synthetic construct
  REGION 1..17: note = Synthetic
VIKTIGGVLGGLLKNLG

SEQ ID NO: 822 - protein, 35 aa, synthetic construct
  REGION 1..35: note = Synthetic
GFGTILKALAKIAGKVVKKLATKPGATYMLKENLK

SEQ ID NO: 823 - protein, 35 aa, synthetic construct
  REGION 1..35: note = Synthetic
AFGTILKALAKIAAKVVKKLATKPGATYMLKQNLQ

SEQ ID NO: 824 - protein, 24 aa, synthetic construct
  REGION 1..24: note = Synthetic
LSRVWNNLSNLVQSSGKAREKGTL

SEQ ID NO: 825 - protein, 16 aa, synthetic construct
  REGION 1..16: note = Synthetic
FSDMATYCRRLIESLS

SEQ ID NO: 826 - protein, 33 aa, synthetic construct
  REGION 1..33: note = Synthetic
KVFKKIEKVGRNIRDGVIKAAPAIEVLGQAKAL

SEQ ID NO: 827 - protein, 15 aa, synthetic construct
  REGION 1..15: note = Synthetic
LSRILSTVIRTCYYL

SEQ ID NO: 828 - protein, 16 aa, synthetic construct
  REGION 1..16: note = Synthetic
ISKIGGVLGGLLKNLG

SEQ ID NO: 829 - protein, 16 aa, synthetic construct
  REGION 1..16: note = Synthetic
ISKIGGVLGGLLKNLG

SEQ ID NO: 830 - protein, 16 aa, synthetic construct
  REGION 1..16: note = Synthetic
ISKIGGVLGGLLKNLG

SEQ ID NO: 831 - protein, 35 aa, synthetic construct
  REGION 1..35: note = Synthetic
AFGTILKALAKIAGKVVKKLATKPGATYMLKENLQ

SEQ ID NO: 832 - protein, 13 aa, synthetic construct
  REGION 1..13: note = Synthetic
CRRYCRRITDACV

SEQ ID NO: 833 - protein, 15 aa, synthetic construct
  REGION 1..15: note = Synthetic
IMDILAKLGKVLAHV

SEQ ID NO: 834 - protein, 19 aa, synthetic construct
  REGION 1..19: note = Synthetic
MEKFLSDLHRLLQQLVKEK

SEQ ID NO: 835 - protein, 30 aa, synthetic construct
  REGION 1..30: note = Synthetic
MVKNMTDVLTTMTKLIKDVPRKNLIYVRLY

SEQ ID NO: 836 - protein, 15 aa, synthetic construct
  REGION 1..15: note = Synthetic
WKKIAEIGKQVLSAL

SEQ ID NO: 837 - protein, 30 aa, synthetic construct
  REGION 1..30: note = Synthetic
KAGEKIVRGLKNIGQRIKDFFGKLTPRTES

SEQ ID NO: 838 - protein, 13 aa, synthetic construct
  REGION 1..13: note = Synthetic
IGGVLGGLLKNLG

SEQ ID NO: 839 - protein, 13 aa, synthetic construct
  REGION 1..13: note = Synthetic
IGGVLGGLLKNLG

SEQ ID NO: 840 - protein, 13 aa, synthetic construct
  REGION 1..13: note = Synthetic
IGGVLGGLLKNLG

SEQ ID NO: 841 - protein, 13 aa, synthetic construct
  REGION 1..13: note = Synthetic
IGGVLGGLLKNLG

SEQ ID NO: 842 - protein, 11 aa, synthetic construct
  REGION 1..11: note = Synthetic
AVKKYLNSILN

SEQ ID NO: 843 - protein, 11 aa, synthetic construct
  REGION 1..11: note = Synthetic
AVKKYLNSILN

SEQ ID NO: 844 - protein, 11 aa, synthetic construct
  REGION 1..11: note = Synthetic
AVKKYLNSILN

SEQ ID NO: 845 - protein, 11 aa, synthetic construct
  REGION 1..11: note = Synthetic
AVKKYLNSILN

SEQ ID NO: 846 - protein, 15 aa, synthetic construct
  REGION 1..15: note = Synthetic
ILTTLANWARKFLGK

SEQ ID NO: 847 - protein, 11 aa, synthetic construct
  REGION 1..11: note = Synthetic
NALGGLLKNLG

SEQ ID NO: 848 - protein, 11 aa, synthetic construct
  REGION 1..11: note = Synthetic
NALGGLLKNLG

SEQ ID NO: 849 - protein, 16 aa, synthetic construct
  REGION 1..16: note = Synthetic
KIKTCWNKILRGIKEH

SEQ ID NO: 850 - protein, 16 aa, synthetic construct
  REGION 1..16: note = Synthetic
KIKTCWNKILRGIKEH

SEQ ID NO: 851 - protein, 35 aa, synthetic construct
  REGION 1..35: note = Synthetic
QICNTLSRVISSLTKSMHAVGCGDRRRSTHRSDEL

SEQ ID NO: 852 - protein, 26 aa, synthetic construct
  REGION 1..26: note = Synthetic
FFENIINLLDRLISTNPKVHQRLRYR

SEQ ID NO: 853 - protein, 19 aa, synthetic construct
  REGION 1..19: note = Synthetic
LLQKIKTCWNKILRGSKEH

SEQ ID NO: 854 - protein, 12 aa, synthetic construct
  REGION 1..12: note = Synthetic
WLKLGKAIIDAL

SEQ ID NO: 855 - protein, 29 aa, synthetic construct
  REGION 1..29: note = Synthetic
KLFDVLKKIIKVIVMVVDSTKANEERQKT

SEQ ID NO: 856 - protein, 25 aa, synthetic construct
  REGION 1..25: note = Synthetic
WMTLLKKVLKAAAKALNAVLVGANA

SEQ ID NO: 857 - protein, 12 aa, synthetic construct
  REGION 1..12: note = Synthetic
WKKMAATALKMI

SEQ ID NO: 858 - protein, 29 aa, synthetic construct
  REGION 1..29: note = Synthetic
RAWLDKLKSIGKVVGKVAIGVAKNLLNPQ

SEQ ID NO: 859 - protein, 12 aa, synthetic construct
  REGION 1..12: note = Synthetic
LKAIAAMAKKLL

SEQ ID NO: 860 - protein, 19 aa, synthetic construct
  REGION 1..19: note = Synthetic
GTLFDILKKVVEVIIKVVV

SEQ ID NO: 861 - protein, 14 aa, synthetic construct
  REGION 1..14: note = Synthetic
TEFLKSFTKLITQV

SEQ ID NO: 862 - protein, 11 aa, synthetic construct
  REGION 1..11: note = Synthetic
LKTLQKLMENY

SEQ ID NO: 863 - protein, 11 aa, synthetic construct
  REGION 1..11: note = Synthetic
LKTLQKLMENY

SEQ ID NO: 864 - protein, 11 aa, synthetic construct
  REGION 1..11: note = Synthetic
LKTLQKLMENY

SEQ ID NO: 865 - protein, 39 aa, synthetic construct
  REGION 1..39: note = Synthetic
RDLKKILNDWDESCDGCLEKGDFIKRIEELKPKYSRSEL

SEQ ID NO: 866 - protein, 39 aa, synthetic construct; identical to SEQ ID NO: 865
  REGION 1..39: note = Synthetic

SEQ ID NO: 867 - protein, 39 aa, synthetic construct; identical to SEQ ID NO: 865
  REGION 1..39: note = Synthetic

SEQ ID NO: 868 - protein, 39 aa, synthetic construct; identical to SEQ ID NO: 865
  REGION 1..39: note = Synthetic

SEQ ID NO: 869 - protein, 39 aa, synthetic construct; identical to SEQ ID NO: 865
  REGION 1..39: note = Synthetic

SEQ ID NO: 870 - protein, 23 aa, synthetic construct
  REGION 1..23: note = Synthetic
EVAQFVKDLLRHLRKLFHQGKFN

SEQ ID NO: 871 - protein, 13 aa, synthetic construct
  REGION 1..13: note = Synthetic
WKKIKSLIKAAMS

SEQ ID NO: 872 - protein, 15 aa, synthetic construct
  REGION 1..15: note = Synthetic
ILNTIINLAKKILGK

SEQ ID NO: 873 - protein, 12 aa, synthetic construct
  REGION 1..12: note = Synthetic
MLAKLGKVLAHV

SEQ ID NO: 874 - protein, 39 aa, synthetic construct
  REGION 1..39: note = Synthetic
RDLKKILNDWDESCDGCLEKTDFIKRIEELKPKYSRNEL

SEQ ID NO: 875 - protein, 39 aa, synthetic construct
  REGION 1..39: note = Synthetic
RDLKKILNDWDESCDGCLEKSDFIKRIEELKPKYSRNEL

SEQ ID NO: 876 - protein, 39 aa, synthetic construct
  REGION 1..39: note = Synthetic
RDLKKILNDWDESCDGCLEKSDFIKRIEELKPKYAHNEL

SEQ ID NO: 877 - protein, 22 aa, synthetic construct
  REGION 1..22: note = Synthetic
DKVKSMGEKLKQYIQTWKAKFG

SEQ ID NO: 878 - protein, 11 aa, synthetic construct
  REGION 1..11: note = Synthetic
SALGGLLKKIG

SEQ ID NO: 879 - protein, 11 aa, synthetic construct
  REGION 1..11: note = Synthetic
SALGGLLKKIG

SEQ ID NO: 880 - protein, 11 aa, synthetic construct
  REGION 1..11: note = Synthetic
SALGGLLKKIG

SEQ ID NO: 881 - protein, 23 aa, synthetic construct
  REGION 1..23: note = Synthetic
FQEYGAVLQKILQDVLGDTATAE

SEQ ID NO: 882 - protein, 12 aa, synthetic construct
  REGION 1..12: note = Synthetic
FVKTVAGHIANI

SEQ ID NO: 883 - protein, 30 aa, synthetic construct
  REGION 1..30: note = Synthetic
QWLTSCWSTLMRLIHQMAGRYRGTPLCLLR

SEQ ID NO: 884 - protein, 33 aa, synthetic construct
  REGION 1..33: note = Synthetic
ILRKAGEKIGGGLKKIGQKIKDFFGKLAPRTES

SEQ ID NO: 885 - protein, 23 aa, synthetic construct
  REGION 1..23: note = Synthetic
FLKRLLQEIKTCWNKILSGTKEH

SEQ ID NO: 886 - protein, 16 aa, synthetic construct
  REGION 1..16: note = Synthetic
NILNTIINLAKKILGK

SEQ ID NO: 887 - protein, 23 aa, synthetic construct
  REGION 1..23: note = Synthetic
NCCRKMTRLLKELLQISEMKSVW

SEQ ID NO: 888 - protein, 32 aa, synthetic construct
  REGION 1..32: note = Synthetic
LRKGGRCWNRCIGNTRQIGSCGVPFLKCCKRK

SEQ ID NO: 889 - protein, 25 aa, synthetic construct
  REGION 1..25: note = Synthetic
ENIRRVFNDCRDIIQRMHLRQYELL

SEQ ID NO: 890 - protein, 11 aa, synthetic construct
  REGION 1..11: note = Synthetic
SALGGLIKKIG

SEQ ID NO: 891 - protein, 11 aa, synthetic construct
  REGION 1..11: note = Synthetic
SALGGLIKKIG

SEQ ID NO: 892 - protein, 11 aa, synthetic construct
  REGION 1..11: note = Synthetic
SALGGLIKKIG

SEQ ID NO: 893 - protein, 11 aa, synthetic construct
  REGION 1..11: note = Synthetic
SALGGLIKKIG

SEQ ID NO: 894 - protein, 11 aa, synthetic construct
  REGION 1..11: note = Synthetic
SALGGLIKKIG

SEQ ID NO: 895 - protein, 35 aa, synthetic construct
  REGION 1..35: note = Synthetic
LSDAMQRIKTMFRNWYQKRRDIRRREGNKGSDSGV

SEQ ID NO: 896 - protein, 37 aa, synthetic construct
  REGION 1..37: note = Synthetic
IGAIKKAGKAIGKGLRAVNIASTAHDVYTFFKPKKRH

SEQ ID NO: 897 - protein, 30 aa, synthetic construct
  REGION 1..30: note = Synthetic
LTEMMKTIKYLIKYLIKKAERNLLYRFFIT

SEQ ID NO: 898 - protein, 23 aa, synthetic construct
  REGION 1..23: note = Synthetic
ALWKNMLKGIGKLAGKAALGAVK

SEQ ID NO: 899 - protein, 40 aa, synthetic construct
  REGION 1..40: note = Synthetic
NSLKEFGNNLKDTFESIPEATRKLMTSFAERLKNFRIPLL

SEQ ID NO: 900 - protein, 23 aa, synthetic construct
  REGION 1..23: note = Synthetic
EVIQLVKNLLNHLRRNFRHGNFK

SEQ ID NO: 901 - protein, 19 aa, synthetic construct
  REGION 1..19: note = Synthetic
GIIDIAKKLVGGIRNVLGI

SEQ ID NO: 902 - protein, 40 aa, synthetic construct
  REGION 1..40: note = Synthetic
VKELKNILGEWGEVCKGCTEKAELIKRIEELKPKYVKEEL

SEQ ID NO: 903 - protein, 19 aa, synthetic construct
  REGION 1..19: note = Synthetic
GILDIAKKLVGGIRNVLGI

SEQ ID NO: 904 - protein, 12 aa, synthetic construct
  REGION 1..12: note = Synthetic
CWNKILRGAKEY

SEQ ID NO: 905 - protein, 17 aa, synthetic construct
  REGION 1..17: note = Synthetic
IGKIGDFIKKAIAKYKN

SEQ ID NO: 906 - protein, 15 aa, synthetic construct
  REGION 1..15: note = Synthetic
KLAAKLKKVIQQLWE

SEQ ID NO: 907 - protein, 39 aa, synthetic construct
  REGION 1..39: note = Synthetic
KHFNKLVKKVKHTISETAHVAKDTAVIAGSGAAVVAATG

SEQ ID NO: 908 - protein, 23 aa, synthetic construct
  REGION 1..23: note = Synthetic
LNALKKVFQGIHEAIKLINNHVQ

SEQ ID NO: 909 - protein, 30 aa, synthetic construct
  REGION 1..30: note = Synthetic
RAWLDKLKSLGKVVGKVGLGVVQNYLNPRQ

SEQ ID NO: 910 - protein, 20 aa, synthetic construct
  REGION 1..20: note = Synthetic
TQAWTNFKKWFKKWFKKTFS

SEQ ID NO: 911 - protein, 20 aa, synthetic construct
  REGION 1..20: note = Synthetic
TQAWTNFKKWFKKWFKKTFS

SEQ ID NO: 912 - protein, 20 aa, synthetic construct
  REGION 1..20: note = Synthetic
TQAWTNFKKWFKKWFKKTFS

SEQ ID NO: 913 - protein, 20 aa, synthetic construct
  REGION 1..20: note = Synthetic
TQAWTNFKKWFKKWFKKTFS

SEQ ID NO: 914 - protein, 24 aa, synthetic construct
  REGION 1..24: note = Synthetic
LVDGASDVLDRVMKALDNVDKKYN

SEQ ID NO: 915 - protein, 12 aa, synthetic construct
  REGION 1..12: note = Synthetic
KIVQKMLKGVPK

SEQ ID NO: 916 - protein, 12 aa, synthetic construct
  REGION 1..12: note = Synthetic
KIVQKMLKGVPK

SEQ ID NO: 917 - protein, 18 aa, synthetic construct
  REGION 1..18: note = Synthetic
ARRFSTLFRHLIKMIMFV

SEQ ID NO: 918 - protein, 34 aa, synthetic construct
  REGION 1..34: note = Synthetic
LKKLGKKLEGAGKRVFNAAEKALPVVAGAKALGK

SEQ ID NO: 919 - protein, 34 aa, synthetic construct; identical to SEQ ID NO: 918
  REGION 1..34: note = Synthetic

SEQ ID NO: 920 - protein, 34 aa, synthetic construct; identical to SEQ ID NO: 918
  REGION 1..34: note = Synthetic

SEQ ID NO: 921 - protein, 11 aa, synthetic construct
  REGION 1..11: note = Synthetic
SALGGLIKKIG

SEQ ID NO: 922 - protein, 11 aa, synthetic construct
  REGION 1..11: note = Synthetic
SALGGLIKKIG

SEQ ID NO: 923 - protein, 11 aa, synthetic construct
  REGION 1..11: note = Synthetic
SALGGLIKKIG

SEQ ID NO: 924 - protein, 11 aa, synthetic construct
  REGION 1..11: note = Synthetic
SALGGLIKKIG

SEQ ID NO: 925 - protein, 11 aa, synthetic construct
  REGION 1..11: note = Synthetic
SALGGLIKKIG

SEQ ID NO: 926 - protein, 17 aa, synthetic construct
  REGION 1..17: note = Synthetic
LRRICGVVSGILDRLVE

SEQ ID NO: 927 - protein, 23 aa, synthetic construct
  REGION 1..23: note = Synthetic
EVAQFVKDLLRHLRKLFHQGTFN

SEQ ID NO: 928 - protein, 12 aa, synthetic construct
  REGION 1..12: note = Synthetic
IHKVVSAIKNVA

SEQ ID NO: 929 - protein, 16 aa, synthetic construct
  REGION 1..16: note = Synthetic
MLRDLRDAFSRVKTFF

SEQ ID NO: 930 - protein, 16 aa, synthetic construct
  REGION 1..16: note = Synthetic
MLRDLRDAFSRVKTFF

SEQ ID NO: 931 - protein, 16 aa, synthetic construct
  REGION 1..16: note = Synthetic
MLRDLRDAFSRVKTFF

SEQ ID NO: 932 - protein, 15 aa, synthetic construct
  REGION 1..15: note = Synthetic
VVDEIEELVQELSDV

SEQ ID NO: 933 - protein, 23 aa, synthetic construct
  REGION 1..23: note = Synthetic
LNTLKKVFQGLHEAIKLINNHVQ

SEQ ID NO: 934 - protein, 12 aa, synthetic construct
  REGION 1..12: note = Synthetic
SIVEGIAKAIRE

SEQ ID NO: 935 - protein, 30 aa, synthetic construct
  REGION 1..30: note = Synthetic
DCYRRFEKGVEKGQKCWRIPTGLRYSKEKE

SEQ ID NO: 936 - protein, 12 aa, synthetic construct
  REGION 1..12: note = Synthetic
NILEQYLKNMQN

SEQ ID NO: 937 - protein, 12 aa, synthetic construct
  REGION 1..12: note = Synthetic
NILEQYLKNMQN

SEQ ID NO: 938 - protein, 14 aa, synthetic construct
  REGION 1..14: note = Synthetic
DAAKKVVNVLKNLP

SEQ ID NO: 939 - protein, 28 aa, synthetic construct
  REGION 1..28: note = Synthetic
GRKYLKNVLKKLNRLKEKNKAKNSKENN

SEQ ID NO: 940 - protein, 39 aa, synthetic construct
  REGION 1..39: note = Synthetic
RDLKKILNDWDESCDGCLEKSDFIKRIEELKPKYAHGEL

SEQ ID NO: 941 - protein, 39 aa, synthetic construct
  REGION 1..39: note = Synthetic
RDLKKILNDWDESCDGCLEKSDFIKRIEELKPKYARSEL

SEQ ID NO: 942 - protein, 39 aa, synthetic construct; identical to SEQ ID NO: 941
  REGION 1..39: note = Synthetic

SEQ ID NO: 943 - protein, 19 aa, synthetic construct
  REGION 1..19: note = Synthetic
KFLDSFMRHMCTVCRNMHI

SEQ ID NO: 944 - protein, 23 aa, synthetic construct
  REGION 1..23: note = Synthetic
NKIRNIGGKVENPWKSQIRDWKN

SEQ ID NO: 945 - protein, 32 aa, synthetic construct
  REGION 1..32: note = Synthetic
KSFSSICKELCKLCQRCNPASNRRHGYWDHWW

SEQ ID NO: 946 - protein, 23 aa, synthetic construct
  REGION 1..23: note = Synthetic
EVAQFVKDLLRHLRKLFHQGTFN

SEQ ID NO: 947 - protein, 30 aa, synthetic construct
  REGION 1..30: note = Synthetic
RAWLDKLKSLGKVVGKVALGVAQNYLNPQQ

SEQ ID NO: 948 - protein, 30 aa, synthetic construct
  REGION 1..30: note = Synthetic
RAWLDKLKSLGKVVGKVAIGVAQHYLNPQQ

SEQ ID NO: 949 - protein, 22 aa, synthetic construct
  REGION 1..22: note = Synthetic
INTLKKVIQGLHEVIKLVSNHA

SEQ ID NO: 950 - protein, 17 aa, synthetic construct
  REGION 1..17: note = Synthetic
LVDVLGKVGGLIKKLLP

SEQ ID NO: 951 - protein, 16 aa, synthetic construct
  REGION 1..16: note = Synthetic
KIKTCWNKILRGITEH

SEQ ID NO: 952 - protein, 12 aa, synthetic construct
  REGION 1..12: note = Synthetic
WKKIGQHILSVL

SEQ ID NO: 953 - protein, 29 aa, synthetic construct
  REGION 1..29: note = Synthetic
LFKTLIKGAGKMLGHVAKQFLGSQGQPES

SEQ ID NO: 954 - protein, 38 aa, synthetic construct
  REGION 1..38: note = Synthetic
RGILDTLKQFAKGVGKDLVKGAAQGVLSTVSCKLAKTC

SEQ ID NO: 955 - protein, 15 aa, synthetic construct
  REGION 1..15: note = Synthetic
ADKCLRYLLKNIKNA

SEQ ID NO: 956 - protein, 19 aa, synthetic construct
  REGION 1..19: note = Synthetic
EVIKKFTKAMEKMKKNGRA

SEQ ID NO: 957 - protein, 19 aa, synthetic construct
  REGION 1..19: note = Synthetic
EVIKKFTKAMEKMKKNGRA

SEQ ID NO: 958 - protein, 19 aa, synthetic construct
  REGION 1..19: note = Synthetic
EVIKKFTKAMEKMKKNGRA

SEQ ID NO: 959 - protein, 12 aa, synthetic construct
  REGION 1..12: note = Synthetic
FLSALLGMLKNL

SEQ ID NO: 960 - protein, 20 aa, synthetic construct
  REGION 1..20: note = Synthetic
KEVIKKFTKAMEKMKKNGRA

SEQ ID NO: 961 - protein, 28 aa, synthetic construct
  REGION 1..28: note = Synthetic
QEFLNSFSKLMQKLFKNSTAERYGKSTI

SEQ ID NO: 962 - protein, 19 aa, synthetic construct
  REGION 1..19: note = Synthetic
NFIKRINDFLKKAKSPPSP

SEQ ID NO: 963 - protein, 16 aa, synthetic construct
  REGION 1..16: note = Synthetic
DKFNDCLNEMRRLIKL

SEQ ID NO: 964 - protein, 32 aa, synthetic construct; identical to SEQ ID NO: 945
  REGION 1..32: note = Synthetic

SEQ ID NO: 965 - protein, 13 aa, synthetic construct
  REGION 1..13: note = Synthetic
FISAIASFLGKFL

SEQ ID NO: 966 - protein, 30 aa, synthetic construct
  REGION 1..30: note = Synthetic
ALWKNMLKGIGKLAGKAALGAVKKLVGAES

SEQ ID NO: 967 - protein, 13 aa, synthetic construct
  REGION 1..13: note = Synthetic
EFFRQWWDIIQSK

SEQ ID NO: 968 - protein, 12 aa, synthetic construct
  REGION 1..12: note = Synthetic
ILGTILGLLKSL

SEQ ID NO: 969 - protein, 28 aa, synthetic construct
  REGION 1..28: note = Synthetic
QEFLNSFSKLMQKLFKNSTAERYGKSTI

SEQ ID NO: 970 - protein, 12 aa, synthetic construct
  REGION 1..12: note = Synthetic
ILGTILGLLKGL

SEQ ID NO: 971 - protein, 12 aa, synthetic construct
  REGION 1..12: note = Synthetic
ILGTILGLLKGL

SEQ ID NO: 972 - protein, 33 aa, synthetic construct
  REGION 1..33: note = Synthetic
  VARIANT 29: note = X - any amino acid
VKELKKILDDWGEMCKGCAEKSDYIRKIXELMP

SEQ ID NO: 973 - protein, 19 aa, synthetic construct
  REGION 1..19: note = Synthetic
LLQKIKTCWNKILRGSKEH

SEQ ID NO: 974 - protein, 23 aa, synthetic construct
  REGION 1..23: note = Synthetic
FLKRLLQKIKTCWNKILMGTKEH

SEQ ID NO: 975 - protein, 12 aa, synthetic construct
  REGION 1..12: note = Synthetic
EVFNKLKSLLEK

SEQ ID NO: 976 - protein, 12 aa, synthetic construct
  REGION 1..12: note = Synthetic
WLKLGKAVIDAL

SEQ ID NO: 977 - protein, 18 aa, synthetic construct
  REGION 1..18: note = Synthetic
GRHLLNELKKWPRWQPKP

SEQ ID NO: 978 - protein, 13 aa, synthetic construct
  REGION 1..13: note = Synthetic
LKAIAALAKKLLG

SEQ ID NO: 979 - protein, 21 aa, synthetic construct
  REGION 1..21: note = Synthetic
YNILECFYKCLDLVKKVLISH

SEQ ID NO: 980 - protein, 30 aa, synthetic construct
  REGION 1..30: note = Synthetic
RALLDKLKSLGKVVGKVALGVVQNYLNPRQ

SEQ ID NO: 981 - protein, 15 aa, synthetic construct
  REGION 1..15: note = Synthetic
LYQLVQTWPNWVKSP

SEQ ID NO: 982 - protein, 28 aa, synthetic construct
  REGION 1..28: note = Synthetic
ALWKNMLKGIGKLAGQAALGAVKTLVGA

SEQ ID NO: 983 - protein, 28 aa, synthetic construct
  REGION 1..28: note = Synthetic
ALWKNMLKGIGKLAGQAALGAVKTLVGA

SEQ ID NO: 984 - protein, 34 aa, synthetic construct
  REGION 1..34: note = Synthetic
RGILDTLKNLAKTAGKGILKSLVNTASCKLSGQC

SEQ ID NO: 985 - protein, 11 aa, synthetic construct
  REGION 1..11: note = Synthetic
VDEATRLMAQL

SEQ ID NO: 986 - protein, 20 aa, synthetic construct
  REGION 1..20: note = Synthetic
KWVDEVCRSLKKYICEFIIP

SEQ ID NO: 987 - protein, 20 aa, synthetic construct
  REGION 1..20: note = Synthetic
LKEALSRFKSWLKRTFGKKE

SEQ ID NO: 988 - protein, 20 aa, synthetic construct
  REGION 1..20: note = Synthetic
LKEALSRFKSWLKRTFGKKE

SEQ ID NO: 989 - protein, 20 aa, synthetic construct
  REGION 1..20: note = Synthetic
LKEALSRFKSWLKRTFGKKE

SEQ ID NO: 990 - protein, 13 aa, synthetic construct
  REGION 1..13: note = Synthetic
FISAIASMLGKFL

SEQ ID NO: 991 - protein, 19 aa, synthetic construct
  REGION 1..19: note = Synthetic
EVIKKFTKAMEKMKKNGRA

SEQ ID NO: 992 - protein, 19 aa, synthetic construct
  REGION 1..19: note = Synthetic
EVIKKFTKAMEKMKKNGRA

SEQ ID NO: 993 - protein, 19 aa, synthetic construct
  REGION 1..19: note = Synthetic
EVIKKFTKAMEKMKKNGRA

SEQ ID NO: 994 - protein, 19 aa, synthetic construct
  REGION 1..19: note = Synthetic
LLQKIKTCWNKILRGSKEH

SEQ ID NO: 995 - protein, 25 aa, synthetic construct
  REGION 1..25: note = Synthetic
LKKIDEVLEKLGKLFIQSGKIKNAF

SEQ ID NO: 996 - protein, 12 aa, synthetic construct
  REGION 1..12: note = Synthetic
IIKKVASVIGGL

SEQ ID NO: 997 - protein, 23 aa, synthetic construct
  REGION 1..23: note = Synthetic
FLKRLLQKIKTCWNKILMGTKEH

SEQ ID NO: 998 - protein, 23 aa, synthetic construct
  REGION 1..23: note = Synthetic
EVTRLAKDLLQQLRKGVRQGKFQ

SEQ ID NO: 999 - protein, 11 aa, synthetic construct
  REGION 1..11: note = Synthetic
FEKLFANMPDY

SEQ ID NO: 1000 - protein, 14 aa, synthetic construct
  REGION 1..14: note = Synthetic
FADLFGKVANLIKS

SEQ ID NO: 1001 - protein, 17 aa, synthetic construct
  REGION 1..17: note = Synthetic
FIEKLMTFIRKALKNAR

SEQ ID NO: 1002 - protein, 20 aa, synthetic construct
  REGION 1..20: note = Synthetic
LKEALSRFKSWLKRTFGKKE

SEQ ID NO: 1003 - protein, 13 aa, synthetic construct
  REGION 1..13: note = Synthetic
FLSAIASMLGKFL

SEQ ID NO: 1004 - protein, 17 aa, synthetic construct
  REGION 1..17: note = Synthetic
LFDIIKSAISIIVKAVE

SEQ ID NO: 1005 - protein, 19 aa, synthetic construct
  REGION 1..19: note = Synthetic
LLQKIKTCWNKILRGAKEY

SEQ ID NO: 1006 - protein, 19 aa, synthetic construct
  REGION 1..19: note = Synthetic
LLQKIKTCWNKILRDAKEH

SEQ ID NO: 1007 - protein, 34 aa, synthetic construct
  REGION 1..34: note = Synthetic
LFSFIHSFIRSALSFLTQTEENSIAARLYATAFQ

SEQ ID NO: 1008 - protein, 23 aa, synthetic construct
  REGION 1..23: note = Synthetic
FLKRLLQKIKTCWNKILMGTKEH

SEQ ID NO: 1009 - protein, 23 aa, synthetic construct
  REGION 1..23: note = Synthetic
FLKRLLQKIKTCWNKILMGTKEH

SEQ ID NO: 1010 - protein, 23 aa, synthetic construct
  REGION 1..23: note = Synthetic
FLKRLLQKIKTCWNKILMGTKEH

SEQ ID NO: 1011 - protein, 17 aa, synthetic construct
  REGION 1..17: note = Synthetic
RCVNNFDDVFNSVFRKL

SEQ ID NO: 1012 - protein, 12 aa, synthetic construct
  REGION 1..12: note = Synthetic
VGNFVHGFSHVF

SEQ ID NO: 1013 - protein, 23 aa, synthetic construct
  REGION 1..23: note = Synthetic
FLKRLLQKIKTCWNKILMGTKEH

SEQ ID NO: 1014 - protein, 25 aa, synthetic construct
  REGION 1..25: note = Synthetic
ARLTKLAEQLMEKIKNLCYTKVLGY

SEQ ID NO: 1015 - protein, 11 aa, synthetic construct
  REGION 1..11: note = Synthetic
LERLFAEMPDY

SEQ ID NO: 1016 - protein, 11 aa, synthetic construct
  REGION 1..11: note = Synthetic
LERLFAEMPDY

SEQ ID NO: 1017 - protein, 17 aa, synthetic construct
  REGION 1..17: note = Synthetic
EQLIEKIKNLWTRVRGY

SEQ ID NO: 1018 - protein, 34 aa, synthetic construct
  REGION 1..34: note = Synthetic
FGTILKALAKIAAKAVKKLATKPGATYMLKQNLE

SEQ ID NO: 1019 - protein, 25 aa, synthetic construct
  REGION 1..25: note = Synthetic
FFTELGASIASIFTNWFKSSTEPSH

SEQ ID NO: 1020 - protein, 23 aa, synthetic construct
  REGION 1..23: note = Synthetic
SLISSIADDIDHAWNKLLGRHRK

SEQ ID NO: 1021 - protein, 12 aa, synthetic construct
  REGION 1..12: note = Synthetic
YQKVWSKITKWG

SEQ ID NO: 1022 - protein, 11 aa, synthetic construct
  REGION 1..11: note = Synthetic
LEKLFANMPDY

SEQ ID NO: 1023 - protein, 19 aa, synthetic construct
  REGION 1..19: note = Synthetic
EFLNSFSKLMQKVIKIHQS

SEQ ID NO: 1024 - protein, 40 aa, synthetic construct
  REGION 1..40: note = Synthetic
YREGGECLQRCIGLFHKIGTCNFRFKCCKFQIPEKKTKIL

SEQ ID NO: 1025 - protein, 16 aa, synthetic construct
  REGION 1..16: note = Synthetic
MGKFARKFCQFMCGIC

SEQ ID NO: 1026 - protein, 16 aa, synthetic construct
  REGION 1..16: note = Synthetic
MGKFARKFCQFMCGIC

SEQ ID NO: 1027 - protein, 13 aa, synthetic construct
  REGION 1..13: note = Synthetic
SADKFWRRFARRR

SEQ ID NO: 1028 - protein, 11 aa, synthetic construct
  REGION 1..11: note = Synthetic
CSDLCQDVDDA

SEQ ID NO: 1029 - protein, 41 aa, synthetic construct
  REGION 1..41: note = Synthetic
IKDAVKKIADEVPDDVKKNAKDIAVKIAKSVTKSIFKYFLN

SEQ ID NO: 1030 - protein, 12 aa, synthetic construct
  REGION 1..12: note = Synthetic
IMGLIKKVAGAL

SEQ ID NO: 1031 - protein, 35 aa, synthetic construct
  REGION 1..35: note = Synthetic
IGASVRKICEKCRLIRRRGRIIVICSNPRHKQRQG

SEQ ID NO: 1032 - protein, 16 aa, synthetic construct
  REGION 1..16: note = Synthetic
KIKTCWNKILRGAKEY

SEQ ID NO: 1033 - protein, 20 aa, synthetic construct
  REGION 1..20: note = Synthetic
EVAQFVKDLLKHLRMIFRHG

SEQ ID NO: 1034 - protein, 30 aa, synthetic construct
  REGION 1..30: note = Synthetic
RALLDKLKSLGKVVGKVALGVAQHYLNPQQ

SEQ ID NO: 1035 - protein, 30 aa, synthetic construct
  REGION 1..30: note = Synthetic
RALLDKLKSLGKVVGKVAIGVAQHYLNPQQ

SEQ ID NO: 1036 - protein, 29 aa, synthetic construct
  REGION 1..29: note = Synthetic
RALLDKLKSLGKVVGKVAIGVAQHYLNPQ

SEQ ID NO: 1037 - protein, 17 aa, synthetic construct
  REGION 1..17: note = Synthetic
FINKLMTFIRKALKPTR

SEQ ID NO: 1038 - protein, 12 aa, synthetic construct
  REGION 1..12: note = Synthetic
VMGIIKKIAGAL

SEQ ID NO: 1039 - protein, 17 aa, synthetic construct
  REGION 1..17: note = Synthetic
DFLERLKKIMKEKYSKC

SEQ ID NO: 1040 - protein, 15 aa, synthetic construct
  REGION 1..15: note = Synthetic
EMKNAMKKLWTRVRK

SEQ ID NO: 1041 - protein, 15 aa, synthetic construct
  REGION 1..15: note = Synthetic
CEKAVHDLWHIIKKF

SEQ ID NO: 1042 - protein, 37 aa, synthetic construct
  REGION 1..37: note = Synthetic
GNFFKDLEKMGQRVRDAVISAAPAVDTLAKAKALGQG

SEQ ID NO: 1043 - protein, 24 aa, synthetic construct
  REGION 1..24: note = Synthetic
LVSSIGRALGGLLADVVKSKGQPA

SEQ ID NO: 1044 - protein, 23 aa, synthetic construct
  REGION 1..23: note = Synthetic
LVSSIGRALGGLLADVVKSKQPA

SEQ ID NO: 1045 - protein, 24 aa, synthetic construct
  REGION 1..24: note = Synthetic
LVSSIGRALGGLLADVVKSKGQPA

SEQ ID NO: 1046 - protein, 23 aa, synthetic construct
  REGION 1..23: note = Synthetic
FLKRLLQKIKTCWNKILMGTKEH

SEQ ID NO: 1047 - protein, 17 aa, synthetic construct
  REGION 1..17: note = Synthetic
LFDIIKTAISIIVKAVE

SEQ ID NO: 1048 - protein, 27 aa, synthetic construct
  REGION 1..27: note = Synthetic
DFIKACGRELVRVWVEICGSVSWGRTA

SEQ ID NO: 1049 - protein, 36 aa, synthetic construct
  REGION 1..36: note = Synthetic
NIFKEIERAVARTRDAVISAGPAVRTVAAATSVASG

SEQ ID NO: 1050 - protein, 19 aa, synthetic construct
  REGION 1..19: note = Synthetic
GLVDVLGKVGGLIKKLLPG

SEQ ID NO: 1051 - protein, 23 aa, synthetic construct
  REGION 1..23: note = Synthetic
FLDKLKKGASDFANALVNSIKGT

SEQ ID NO: 1052 - protein, 30 aa, synthetic construct
  REGION 1..30: note = Synthetic
RALWKNMLKGIGKLAGQAALGAVKTLVGAE

SEQ ID NO: 1053 - protein, 21 aa, synthetic construct
  REGION 1..21: note = Synthetic
LIRGAIHAGKAIHGLIHRRRH

SEQ ID NO: 1054 - protein, 34 aa, synthetic construct
  REGION 1..34: note = Synthetic
SIAKLMEEFMEKVFNFGKSEALKMGSAPTPAPKN

SEQ ID NO: 1055 - protein, 15 aa, synthetic construct
  REGION 1..15: note = Synthetic
LWDKFQKFLKKVIRI

SEQ ID NO: 1056 - protein, 23 aa, synthetic construct
  REGION 1..23: note = Synthetic
EVTRLAKDLLQQLRKGVRQGKFE

SEQ ID NO: 1057 - protein, 32 aa, synthetic construct
  REGION 1..32: note = Synthetic
LKSFMERIINEIDRFGIKIKRNFSRLLYSSKN

SEQ ID NO: 1058 - protein, 21 aa, synthetic construct
  REGION 1..21: note = Synthetic
STLRDFLERLKKIMKEKYSKC

SEQ ID NO: 1059 - protein, 21 aa, synthetic construct
  REGION 1..21: note = Synthetic
STLRDFLERLKKIMKEKYSKC

SEQ ID NO: 1060 - protein, 21 aa, synthetic construct
  REGION 1..21: note = Synthetic
STLRDFLERLKKIMKEKYSKC

SEQ ID NO: 1061 - protein, 28 aa, synthetic construct
  REGION 1..28: note = Synthetic
FLKGVGKALAGVGKMVADQFGNLLQAGQ

SEQ ID NO: 1062 - protein, 28 aa, synthetic construct
  REGION 1..28: note = Synthetic
FLKGVGKALAGVGKVVADQFGNLLQAGQ

SEQ ID NO: 1063 - protein, 23 aa, synthetic construct
  REGION 1..23: note = Synthetic
EVAQFVQTLLRYLQSLYRHGNFN

SEQ ID NO: 1064 - protein, 30 aa, synthetic construct
  REGION 1..30: note = Synthetic
ALWKNMLKGIGKLAGQAALGAVKTLVGAES

SEQ ID NO: 1065 - protein, 41 aa, synthetic construct
  REGION 1..41: note = Synthetic
GACKKIMRTCLRLISRDILAGKKPQEVCVDIKLCKHKAGLI

SEQ ID NO: 1066 - protein, 24 aa, synthetic construct
  REGION 1..24: note = Synthetic
FWGALIKGAAKLIPSVVGLFKKKQ

SEQ ID NO: 1067 - protein, 13 aa, synthetic construct
  REGION 1..13: note = Synthetic
IIGAIPQVIGAIR

SEQ ID NO: 1068 - protein, 13 aa, synthetic construct
  REGION 1..13: note = Synthetic
IIGAIPQVIGAIR

SEQ ID NO: 1069 - protein, 23 aa, synthetic construct
  REGION 1..23: note = Synthetic
FLKRLLQKIKTCWNKILMGTKEH

SEQ ID NO: 1070 - protein, 19 aa, synthetic construct
  REGION 1..19: note = Synthetic
GFFDLAKKVVGGIRNALGI

SEQ ID NO: 1071 - protein, 21 aa, synthetic construct
  REGION 1..21: note = Synthetic
LKDFLENLKRIMQKRYSKCRR

SEQ ID NO: 1072 - protein, 11 aa, synthetic construct
  REGION 1..11: note = Synthetic
AHQVLANLLKM

SEQ ID NO: 1073 - protein, 36 aa, synthetic construct
  REGION 1..36: note = Synthetic
RYLATFLQPLSQKWIAFLLKKIFSKRSSIRKTLPFS

SEQ ID NO: 1074 - protein, 15 aa, synthetic construct
  REGION 1..15: note = Synthetic
LFDVIKKVASVIGGL

SEQ ID NO: 1075 - protein, 39 aa, synthetic construct
  REGION 1..39: note = Synthetic
RDLKKILNDWDENCEGCLEKSDFIKRIEELKPKYTRSEL

SEQ ID NO: 1076 - protein, 19 aa, synthetic construct
  REGION 1..19: note = Synthetic
GIVDFAKKVVGGIRNALGI

SEQ ID NO: 1077 - protein, 26 aa, synthetic construct
  REGION 1..26: note = Synthetic
IFYRLDRICEDCYSLFREPQILSFCK

SEQ ID NO: 1078 - protein, 35 aa, synthetic construct
  REGION 1..35: note = Synthetic
DLLRRLKKLLDEVDTEHETNDFLEDFFDLIFFKKI

SEQ ID NO: 1079 - protein, 23 aa, synthetic construct
  REGION 1..23: note = Synthetic
FLKRLLQEIKTCWNKILMGTKEH

SEQ ID NO: 1080 - protein, 23 aa, synthetic construct
  REGION 1..23: note = Synthetic
FLKRLLQEIKTCWNKILMGTKEH

SEQ ID NO: 1081 - protein, 23 aa, synthetic construct
  REGION 1..23: note = Synthetic
FLKRLLQEIKTCWNKILMGTKEH

SEQ ID NO: 1082 - protein, 23 aa, synthetic construct
  REGION 1..23: note = Synthetic
FLKRLLQEIKTCWNKILMGTKEH

SEQ ID NO: 1083 - protein, 23 aa, synthetic construct
  REGION 1..23: note = Synthetic
FLKRLLQEIKTCWNKILMGTKEH

SEQ ID NO: 1084 - protein, 23 aa, synthetic construct
  REGION 1..23: note = Synthetic
FLKRLLQEIKTCWNKILMGTKEH

SEQ ID NO: 1085 - protein, 19 aa, synthetic construct
  REGION 1..19: note = Synthetic
GFVDLAKKVVGGIRNALGI

SEQ ID NO: 1086 - protein, 17 aa, synthetic construct
  REGION 1..17: note = Synthetic
LSDIIKTAISIIVKAVE

SEQ ID NO: 1087 - protein, 21 aa, synthetic construct
  REGION 1..21: note = Synthetic
LIKGAIHAGKAIHGLIHRRRH

SEQ ID NO: 1088 - protein, 25 aa, synthetic construct
  REGION 1..25: note = Synthetic
SILRGLKKLGKMGQAFVNCEIYKKC

SEQ ID NO: 1089 - protein, 15 aa, synthetic construct
  REGION 1..15: note = Synthetic
LFDIVKKVVGAIGSL

SEQ ID NO: 1090 - protein, 24 aa, synthetic construct
  REGION 1..24: note = Synthetic
SLFQMINEFFTSIGTTIKDLFTFR

SEQ ID NO: 1091 - protein, 15 aa, synthetic construct
  REGION 1..15: note = Synthetic
LLDIVKKVVGAFGSL

SEQ ID NO: 1092 - protein, 15 aa, synthetic construct
  REGION 1..15: note = Synthetic
LLDIVKKVVGAFGSL

SEQ ID NO: 1093 - protein, 15 aa, synthetic construct
  REGION 1..15: note = Synthetic
LFDIVKKVVGAFGSL

SEQ ID NO: 1094 - protein, 15 aa, synthetic construct
  REGION 1..15: note = Synthetic
LFDIVKKVVGAFGSL

SEQ ID NO: 1095 - protein, 27 aa, synthetic construct
  REGION 1..27: note = Synthetic
GMWGSLLKGVATVVKHVLPHALSSQQS

SEQ ID NO: 1096 - protein, 26 aa, synthetic construct
  REGION 1..26: note = Synthetic
NMARKCRECCGGIGKCFGPQCLCNRI

SEQ ID NO: 1097 - protein, 39 aa, synthetic construct
  REGION 1..39: note = Synthetic
IFGSLFSLGSKLLPTVFKLFSRKKQRALMKRDLEDIMDP

SEQ ID NO: 1098 - protein, 12 aa, synthetic construct
  REGION 1..12: note = Synthetic
ILGLLGKALSHL

SEQ ID NO: 1099 - protein, 13 aa, synthetic construct
  REGION 1..13: note = Synthetic
LIGAIPQVIGAIR

SEQ ID NO: 1100 - protein, 19 aa, synthetic construct
  REGION 1..19: note = Synthetic
SLVKLVSTLLSLVPSLMKG

SEQ ID NO: 1101 - protein, 11 aa, synthetic construct
  REGION 1..11: note = Synthetic
AMRKYLDSILN

SEQ ID NO: 1102 - protein, 19 aa, synthetic construct
  REGION 1..19: note = Synthetic
GILDVAKTLVGKLRNVLGI

SEQ ID NO: 1103 - protein, 30 aa, synthetic construct
  REGION 1..30: note = Synthetic
DCYRRFEKGVEKGQKCWCIPTGLKYSKKKE

SEQ ID NO: 1104 - protein, 20 aa, synthetic construct
  REGION 1..20: note = Synthetic
KEFLERLKSLIQRMIHQHLS

SEQ ID NO: 1105 - protein, 38 aa, synthetic construct
  REGION 1..38: note = Synthetic
LKEFGNNLKDAFESIPEATRKLMTSFAEGLKNLRLPLL

SEQ ID NO: 1106 - protein, 17 aa, synthetic construct
  REGION 1..17: note = Synthetic
FLNRWITFCQSIISTLT

SEQ ID NO: 1107 - protein, 13 aa, synthetic construct
  REGION 1..13: note = Synthetic
CVRFVKKVVEKVG

SEQ ID NO: 1108 - protein, 36 aa, synthetic construct
  REGION 1..36: note = Synthetic
KAINELIKVMNDLLPKSNLRKRKRSQNLFRGRRAST

SEQ ID NO: 1109 - protein, 26 aa, synthetic construct
  REGION 1..26: note = Synthetic
IGAVLKVLTTGLPALISWIKRKRQQG

SEQ ID NO: 1110 - protein, 26 aa, synthetic construct
  REGION 1..26: note = Synthetic
IGAVLKVLTTGLPALISWIKRKRQQG

SEQ ID NO: 1111 - protein, 26 aa, synthetic construct
  REGION 1..26: note = Synthetic
IGAVLKVLTTGLPALISWIKRKRQQG

SEQ ID NO: 1112 - protein, 26 aa, synthetic construct
  REGION 1..26: note = Synthetic
IGAVLKVLTTGLPALISWIKRKRQQG

SEQ ID NO: 1113 - protein, 26 aa, synthetic construct
  REGION 1..26: note = Synthetic
IGAVLKVLTTGLPALISWIKRKRQQG

SEQ ID NO: 1114 - protein, 14 aa, synthetic construct
  REGION 1..14: note = Synthetic
WVQKYIEYLDQMSK

SEQ ID NO: 1115 - protein, 25 aa, synthetic construct
  REGION 1..25: note = Synthetic
ERCCKNGKRGCGRWCRDHSRCCGRR

SEQ ID NO: 1116 - protein, 12 aa, synthetic construct
  REGION 1..12: note = Synthetic
IIKKVASVVGGL

SEQ ID NO: 1117 - protein, 26 aa, synthetic construct
  REGION 1..26: note = Synthetic
IGAVLKVLATGLPALISWIKRKRQQG

SEQ ID NO: 1118 - protein, 36 aa, synthetic construct
  REGION 1..36: note = Synthetic
ILDSFKQFAKGVGKDLIKGAAQGVLSTMSCKLAKTC

SEQ ID NO: 1119 - protein, 18 aa, synthetic construct
  REGION 1..18: note = Synthetic
FIKKLMTFIRKVLKTPRL

SEQ ID NO: 1120 - protein, 19 aa, synthetic construct
  REGION 1..19: note = Synthetic
REFVKQLESLLQKVTGYYE

SEQ ID NO: 1121 - protein, 24 aa, synthetic construct
  REGION 1..24: note = Synthetic
RLTKLAEQLMEKIKNLCYTKVLGY

SEQ ID NO: 1122 - protein, 15 aa, synthetic construct
  REGION 1..15: note = Synthetic
LFDIVKKVVGALGSL

SEQ ID NO: 1123 - protein, 21 aa, synthetic construct
  REGION 1..21: note = Synthetic
QVLHQVQKLANELLRKLWSSG

SEQ ID NO: 1124 - protein, 11 aa, synthetic construct
  REGION 1..11: note = Synthetic
AVKKYINSLLA

SEQ ID NO: 1125 - protein, 24 aa, synthetic construct
  REGION 1..24: note = Synthetic
LVSSIGKALGGLLADVVKSKGQPA

SEQ ID NO: 1126 - protein, 24 aa, synthetic construct
  REGION 1..24: note = Synthetic
LVSSIGKALGGLLADVVKSKGQPA

SEQ ID NO: 1127 - protein, 30 aa, synthetic construct
  REGION 1..30: note = Synthetic
RWIAFCHNILSCCKNMTRFQPPQAKDPWVH

SEQ ID NO: 1128 - protein, 30 aa, synthetic construct
  REGION 1..30: note = Synthetic
RWIAFCHNILSCCKNMTRFQPLQAKDPWVH

SEQ ID NO: 1129 - protein, 20 aa, synthetic construct
  REGION 1..20: note = Synthetic
TQAWTNFKKWFKKWFKETFS

SEQ ID NO: 1130 - protein, 20 aa, synthetic construct
  REGION 1..20: note = Synthetic
TQAWTNFKKWFKKWFKETFS

SEQ ID NO: 1131 - protein, 39 aa, synthetic construct
  REGION 1..39: note = Synthetic
DCTACLSNLVNRIFSICNNAIGARVQLVDCFIQYEQRSF

SEQ ID NO: 1132 - protein, 23 aa, synthetic construct
  REGION 1..23: note = Synthetic
AVRRLLTAVQNIVDDVRNSKASC

SEQ ID NO: 1133 - protein, 25 aa, synthetic construct
  REGION 1..25: note = Synthetic
IGAILKVLATGLPTLISWIKNKRKQ

SEQ ID NO: 1134 - protein, 25 aa, synthetic construct
  REGION 1..25: note = Synthetic
SILRGLKKLGNMGQAFVNCKIYKKC

SEQ ID NO: 1135 - protein, 26 aa, synthetic construct
  REGION 1..26: note = Synthetic
IGAVLKVLTTGLPALIGWIKRKRQQG

SEQ ID NO: 1136 - protein, 15 aa, synthetic construct
  REGION 1..15: note = Synthetic
QELFSLLKRLINKVN

SEQ ID NO: 1137 - protein, 19 aa, synthetic construct
  REGION 1..19: note = Synthetic
GIVDFAKGVLGKIKNVLGI

SEQ ID NO: 1138 - protein, 34 aa, synthetic construct
  REGION 1..34: note = Synthetic
LSNLVNRIFSICNNAIGARVQLVDCFIQYEQRSF

SEQ ID NO: 1139 - protein, 34 aa, synthetic construct; identical to SEQ ID NO: 1138
  REGION 1..34: note = Synthetic

SEQ ID NO: 1140 - protein, 23 aa, synthetic construct
  REGION 1..23: note = Synthetic
RTLKDFLERLKTIMQEKYSKGGS

SEQ ID NO: 1141 - protein, 15 aa, synthetic construct
  REGION 1..15: note = Synthetic
LFDIVKKVVGTIAGL

SEQ ID NO: 1142 - protein, 26 aa, synthetic construct
  REGION 1..26: note = Synthetic
GLFGKLIKKFGRKAISYAVKKARGKH

SEQ ID NO: 1143 - protein, 26 aa, synthetic construct
  REGION 1..26: note = Synthetic
GLFGKLIKKFGRKAISYAVKKARGKN

SEQ ID NO: 1144 - protein, 15 aa, synthetic construct
  REGION 1..15: note = Synthetic
QAIRCMQSLFRTVKR

SEQ ID NO: 1145 - protein, 20 aa, synthetic construct
  REGION 1..20: note = Synthetic
IGKCWHDIMECWQHCHGRKV

SEQ ID NO: 1146 - protein, 20 aa, synthetic construct
  REGION 1..20: note = Synthetic
KKWVQDAKKYLDQISQTTKP

SEQ ID NO: 1147 - protein, 34 aa, synthetic construct; identical to SEQ ID NO: 1138
  REGION 1..34: note = Synthetic

SEQ ID NO: 1148 - protein, 28 aa, synthetic construct
  REGION 1..28: note = Synthetic
KYWTECCGRIGPHCSRCICPGVVCPKRG

SEQ ID NO: 1149 - protein, 13 aa, synthetic construct
  REGION 1..13: note = Synthetic
FFRVLAKLGKLAK

SEQ ID NO: 1150 - protein, 20 aa, synthetic construct
  REGION 1..20: note = Synthetic
KEFLERLKSLIQKMIHQHLS

SEQ ID NO: 1151 - protein, 26 aa, synthetic construct
  REGION 1..26: note = Synthetic
GLWKNMLSGIGKLAGQAALGAVKTLV

SEQ ID NO: 1152 - protein, 14 aa, synthetic construct
  REGION 1..14: note = Synthetic
CCNFLGKCCHLVKG

SEQ ID NO: 1153 - protein, 31 aa, synthetic construct
  REGION 1..31: note = Synthetic
ALWKTLLKKVGKVAGKAVLNAVTNMANQNEQ

SEQ ID NO: 1154 - protein, 15 aa, synthetic construct
  REGION 1..15: note = Synthetic
EDIASDLKSMLQDLE

SEQ ID NO: 1155 - protein, 15 aa, synthetic construct
  REGION 1..15: note = Synthetic
VQSCADSCSKMCTKI

SEQ ID NO: 1156 - protein, 12 aa, synthetic construct
  REGION 1..12: note = Synthetic
VKTVCKKVLKQG

SEQ ID NO: 1157 - protein, 15 aa, synthetic construct
  REGION 1..15: note = Synthetic
DKAKKFGGKIKKWFG

SEQ ID NO: 1158 - protein, 23 aa, synthetic construct
  REGION 1..23: note = Synthetic
EKLKKIGQKIQGFVPKLAPRTDY

SEQ ID NO: 1159 - protein, 29 aa, synthetic construct
  REGION 1..29: note = Synthetic
KLCRNVGGKLKKVLHFIQKSVSKIKSCKK

SEQ ID NO: 1160 - protein, 25 aa, synthetic construct
  REGION 1..25: note = Synthetic
IGAILKVLSTGLPALISWIKRKRQE

SEQ ID NO: 1161 - protein, 29 aa, synthetic construct
  REGION 1..29: note = Synthetic
RGIMDTVKNVAKNLAGQLLDKLKCKITAC

SEQ ID NO: 1162 - protein, 42 aa, synthetic construct
  REGION 1..42: note = Synthetic
KKILDDWGEMCKGCAEKSDYIRKINELMPKYAPKAASARTDL

SEQ ID NO: 1163 - protein, 30 aa, synthetic construct
  REGION 1..30: note = Synthetic
TWISFCHNILSCCKSMTKFLPPQAKEPWSK

SEQ ID NO: 1164 - protein, 21 aa, synthetic construct
  REGION 1..21: note = Synthetic
NLIRAAERIFKDCMHLWNCGK

SEQ ID NO: 1165 - protein, 15 aa, synthetic construct
  REGION 1..15: note = Synthetic
VYEIIKTWDHWAESP

SEQ ID NO: 1166 - protein, 20 aa, synthetic construct
  REGION 1..20: note = Synthetic
KEFLERLKSLLQKMVHQHLP

SEQ ID NO: 1167 - protein, 22 aa, synthetic construct
  REGION 1..22: note = Synthetic
KQFLDYLQEFLAVINTEWTIEG

SEQ ID NO: 1168 - protein, 41 aa, synthetic construct
  REGION 1..41: note = Synthetic
KILDDWGETCKGCAEKSDYIRKINELMPKYAPKAASSRTDL

SEQ ID NO: 1169 - protein, 39 aa, synthetic construct
  REGION 1..39: note = Synthetic
DFLKELEGVGQRVRDSIISAGPAIDVLKKSQGPRRWSRP

SEQ ID NO: 1170 - protein, 33 aa, synthetic construct
  REGION 1..33: note = Synthetic
LLQRIQSWWKNLFQHGASSSTRRLRQLTNGEKK

SEQ ID NO: 1171 - protein, 29 aa, synthetic construct
  REGION 1..29: note = Synthetic
KEFLERFKSLLQKMIHQHLSSRTHGSEDS

SEQ ID NO: 1172 - protein, 29 aa, synthetic construct
  REGION 1..29: note = Synthetic
KEFLERFKSLLQKMIHQHLSSRTHGSEDS

SEQ ID NO: 1173 - protein, 29 aa, synthetic construct
  REGION 1..29: note = Synthetic
KEFLERFKSLLQKMIHQHLSSRTHGSEDS

SEQ ID NO: 1174 - protein, 29 aa, synthetic construct
  REGION 1..29: note = Synthetic
KEFLERFKSLLQKMIHQHLSSRTHGSEDS

SEQ ID NO: 1175 - protein, 29 aa, synthetic construct
  REGION 1..29: note = Synthetic
KEFLERFKSLLQKMIHQHLSSRTHGSEDS

SEQ ID NO: 1176 - protein, 29 aa, synthetic construct
  REGION 1..29: note = Synthetic
KEFLERFKSLLQKMIHQHLSSRTHGSEDS

SEQ ID NO: 1177 - protein, 12 aa, synthetic construct
  REGION 1..12: note = Synthetic
SGLGCWRRIVDS

SEQ ID NO: 1178 - protein, 20 aa, synthetic construct
  REGION 1..20: note = Synthetic
KEFLERLKSLIQKMIHQHLS

SEQ ID NO: 1179 - protein, 20 aa, synthetic construct
  REGION 1..20: note = Synthetic
KEFLERLKSLIQKMIHQHLS

SEQ ID NO: 1180 - protein, 12 aa, synthetic construct
  REGION 1..12: note = Synthetic
EEYQALVQTVGK

SEQ ID NO: 1181 - protein, 26 aa, synthetic construct
  REGION 1..26: note = Synthetic
RTLKDFLERLKTIMQEKYSKGGSWIF

SEQ ID NO: 1182 - protein, 13 aa, synthetic construct
  REGION 1..13: note = Synthetic
KLIKTVASAIANQ

SEQ ID NO: 1183 - protein, 20 aa, synthetic construct
  REGION 1..20: note = Synthetic
DRLKQFMQKLIDNLDQLKSC

SEQ ID NO: 1184 - protein, 11 aa, synthetic construct
  REGION 1..11: note = Synthetic
GLLKGISALLS

SEQ ID NO: 1185 - protein, 28 aa, synthetic construct
  REGION 1..28: note = Synthetic
IFDKLKNFAKGVAQSLLNKASCKLSGQC

SEQ ID NO: 1186 - protein, 20 aa, synthetic construct
  REGION 1..20: note = Synthetic
TQAWTNFKKWFKNWFKKTFS

SEQ ID NO: 1187 - protein, 16 aa, synthetic construct
  REGION 1..16: note = Synthetic
LGSLLKTGLKVGSNLL

SEQ ID NO: 1188 - protein, 29 aa, synthetic construct
  REGION 1..29: note = Synthetic
FRKLFRVYSNFLRGKLKLYTGEACRTGDR

SEQ ID NO: 1189 - protein, 25 aa, synthetic construct
  REGION 1..25: note = Synthetic
LIGSIGKALGGLLVDVLKPKLQAAS

SEQ ID NO: 1190 - protein, 30 aa, synthetic construct
  REGION 1..30: note = Synthetic
DCYRRFEKGVEKGQKCWCIPTGLRYSKEKE

SEQ ID NO: 1191 - protein, 30 aa, synthetic construct; identical to SEQ ID NO: 1190
  REGION 1..30: note = Synthetic

SEQ ID NO: 1192 - protein, 30 aa, synthetic construct; identical to SEQ ID NO: 1190
  REGION 1..30: note = Synthetic

SEQ ID NO: 1193 - protein, 30 aa, synthetic construct; identical to SEQ ID NO: 1190
  REGION 1..30: note = Synthetic

SEQ ID NO: 1194 - protein, 30 aa, synthetic construct; identical to SEQ ID NO: 1190
  REGION 1..30: note = Synthetic

SEQ ID NO: 1195 - protein, 30 aa, synthetic construct; identical to SEQ ID NO: 1190
  REGION 1..30: note = Synthetic

SEQ ID NO: 1196 - protein, 16 aa, synthetic construct
  REGION 1..16: note = Synthetic
LFDIVKKIAGHIASSI

SEQ ID NO: 1197 - protein, 16 aa, synthetic construct
  REGION 1..16: note = Synthetic
LFDIVKKIAGHIASSI

SEQ ID NO: 1198 - protein, 16 aa, synthetic construct
  REGION 1..16: note = Synthetic
DCMRTCGGAIGPWENL

SEQ ID NO: 1199 - protein, 23 aa, synthetic construct
  REGION 1..23: note = Synthetic
IKDWIKGAAKKLIKTVASHIANQ

SEQ ID NO: 1200 - protein, 24 aa, synthetic construct
  REGION 1..24: note = Synthetic
LLKELWTKIKGAGKAVLGKIKGLL

SEQ ID NO: 1201 - protein, 13 aa, synthetic construct
  REGION 1..13: note = Synthetic
MEKAADKIKNLFG

SEQ ID NO: 1202 - protein, 19 aa, synthetic construct
  REGION 1..19: note = Synthetic
LLEKIKTCWNKILSGTKEH

SEQ ID NO: 1203 - protein, 20 aa, synthetic construct
  REGION 1..20: note = Synthetic
ATKFIEKLMTFIRRASKNAR

SEQ ID NO: 1204 - protein, 29 aa, synthetic construct
  REGION 1..29: note = Synthetic
CRKVVKYWTHCCQEGLRCTWERGVPKCEP

SEQ ID NO: 1205 - protein, 26 aa, synthetic construct
  REGION 1..26: note = Synthetic
FWGHIWNAVKRVGANALHGAVTGALS

SEQ ID NO: 1206 - protein, 22 aa, synthetic construct
  REGION 1..22: note = Synthetic
ETIVEFLNKWITFCQSIISTLT

SEQ ID NO: 1207 - protein, 22 aa, synthetic construct
  REGION 1..22: note = Synthetic
ETIVEFLNKWITFCQSIISTLT

SEQ ID NO: 1208 - protein, 16 aa, synthetic construct
  REGION 1..16: note = Synthetic
LFDIVKKIAGHIAGSI

SEQ ID NO: 1209 - protein, 16 aa, synthetic construct
  REGION 1..16: note = Synthetic
LFDIVKKIAGHIAGSI

SEQ ID NO: 1210 - protein, 28 aa, synthetic construct
  REGION 1..28: note = Synthetic
FLDKLKNFAKGVAQSLLNKASCKLSGQC

SEQ ID NO: 1211 - protein, 24 aa, synthetic construct
  REGION 1..24: note = Synthetic
GFKDWIKGAAKKLIKTVAANIANQ

SEQ ID NO: 1212 - protein, 13 aa, synthetic construct
  REGION 1..13: note = Synthetic
RVVEKFLKRAENS

SEQ ID NO: 1213 - protein, 36 aa, synthetic construct
  REGION 1..36: note = Synthetic
FSSIFRGVAKFASKGLGKDLARLGVNLVACKISKQC

SEQ ID NO: 1214 - protein, 29 aa, synthetic construct
  REGION 1..29: note = Synthetic
NMFSDVADELRRLVIVFDCRSVSIQQLLR

SEQ ID NO: 1215 - protein, 32 aa, synthetic construct
  REGION 1..32: note = Synthetic
WYQLIRTFGNLIHQKYRKLLEAYRKLRDIFSG

SEQ ID NO: 1216 - protein, 27 aa, synthetic construct
  REGION 1..27: note = Synthetic
ENLTQFFSSLESLIQKSITRLSLNKKR

SEQ ID NO: 1217 - protein, 13 aa, synthetic construct
  REGION 1..13: note = Synthetic
KYATNCAKTCGKC

SEQ ID NO: 1218 - protein, 15 aa, synthetic construct
  REGION 1..15: note = Synthetic
VQSCVDSCSKMCTKI

SEQ ID NO: 1219 - protein, 15 aa, synthetic construct
  REGION 1..15: note = Synthetic
VQSCVDSCSKMCTKI

SEQ ID NO: 1220 - protein, 17 aa, synthetic construct
  REGION 1..17: note = Synthetic
FVDFLKKVAGTIANVVT

SEQ ID NO: 1221 - protein, 28 aa, synthetic construct
  REGION 1..28: note = Synthetic
ALWKDILKNVGKAAGKAVLNTVTDMVNQ

SEQ ID NO: 1222 - protein, 31 aa, synthetic construct
  REGION 1..31: note = Synthetic
ALWKDILKNVGKAAGKAVLNTVTDMVNQGEQ

SEQ ID NO: 1223 - protein, 13 aa, synthetic construct
  REGION 1..13: note = Synthetic
KYATNCAKTCGKC

SEQ ID NO: 1224 - protein, 16 aa, synthetic construct
  REGION 1..16: note = Synthetic
LFDIVKKIAGHIVSSI

SEQ ID NO: 1225 - protein, 32 aa, synthetic construct
  REGION 1..32: note = Synthetic
LGSFMKGVGKGLATVGKIVADQFGKLLEAGQG

SEQ ID NO: 1226 - protein, 32 aa, synthetic construct
  REGION 1..32: note = Synthetic
LGSFMKGVGKGLATVGKIVADQFGKLLEAGKG

SEQ ID NO: 1227 - protein, 41 aa, synthetic construct
  REGION 1..41: note = Synthetic
KILDDWGETCKGCAEKSDYIRKINELMPKYAPKAASARTDL

SEQ ID NO: 1228 - protein, 24 aa, synthetic construct
  REGION 1..24: note = Synthetic
VWSTVLGGLKKFAKGGLEAIVNPK

SEQ ID NO: 1229 - protein, 16 aa, synthetic construct
  REGION 1..16: note = Synthetic
VDEVFSEVVKIFDKEG

SEQ ID NO: 1230 - protein, 19 aa, synthetic construct
  REGION 1..19: note = Synthetic
SRCYRSLYKCVAVCNRLVH

SEQ ID NO: 1231 - protein, 29 aa, synthetic construct
  REGION 1..29: note = Synthetic
KEFLERFKSLLQKMIHRHLSSRTHGSEDS

SEQ ID NO: 1232 - protein, 13 aa, synthetic construct
  REGION 1..13: note = Synthetic
VGRVHRLLRKGNY

SEQ ID NO: 1233 - protein, 14 aa, synthetic construct
  REGION 1..14: note = Synthetic
LYSALYKCMSFLKK

SEQ ID NO: 1234 - protein, 11 aa, synthetic construct
  REGION 1..11: note = Synthetic
LENLFTHMPDY

SEQ ID NO: 1235 - protein, 21 aa, synthetic construct
  REGION 1..21: note = Synthetic
HSFYKCIDNLCKRFRRQKHLV

SEQ ID NO: 1236 - protein, 19 aa, synthetic construct
  REGION 1..19: note = Synthetic
NWFSEAFKKVKEHLKTAFS

SEQ ID NO: 1237 - protein, 23 aa, synthetic construct
  REGION 1..23: note = Synthetic
GFRDVLKGAAKAFVKTVAGHIAN

SEQ ID NO: 1238 - protein, 24 aa, synthetic construct
  REGION 1..24: note = Synthetic
GFRDVLKGAAKAFVKTVAGHIANI

SEQ ID NO: 1239 - protein, 31 aa, synthetic construct
  REGION 1..31: note = Synthetic
LRGFLKGVGTALAGVGKVVADQFDKLLQAGQ

SEQ ID NO: 1240 - protein, 17 aa, synthetic construct
  REGION 1..17: note = Synthetic
KWVKQVVHMLSQRVKRM

SEQ ID NO: 1241 - protein, 32 aa, synthetic construct
  REGION 1..32: note = Synthetic
EKAEKFFDRLNSLIQKVHLKSSICHLMSSLMF

SEQ ID NO: 1242 - protein, 15 aa, synthetic construct
  REGION 1..15: note = Synthetic
RVLKRLLAMLRQHAF

SEQ ID NO: 1243 - protein, 34 aa, synthetic construct
  REGION 1..34: note = Synthetic
RGIMDTLKNLAKTAGKGALQSLVKMASCKLSGQC

SEQ ID NO: 1244 - protein, 23 aa, synthetic construct
  REGION 1..23: note = Synthetic
KIMRKIMTNLSRLCPVHKRSKRY

SEQ ID NO: 1245 - protein, 13 aa, synthetic construct
  REGION 1..13: note = Synthetic
AKKFGGKIMKWFS

SEQ ID NO: 1246 - protein, 26 aa, synthetic construct
  REGION 1..26: note = Synthetic
ALWKNMLSGIGKLAGQAALGAVKTLV

SEQ ID NO: 1247 - protein, 30 aa, synthetic construct
  REGION 1..30: note = Synthetic
GWKDWLNKGKEWLKKKGPGIMKAALKAATQ

SEQ ID NO: 1248 - protein, 22 aa, synthetic construct
  REGION 1..22: note = Synthetic
INTLKKVIQGLHEVIKLVSNHE

SEQ ID NO: 1249 - protein, 14 aa, synthetic construct
  REGION 1..14: note = Synthetic
KGIIRTIKDWYKGK

SEQ ID NO: 1250 - protein, 40 aa, synthetic construct
  REGION 1..40: note = Synthetic
EKGMKALKNYANDVINGPAEAPAAAAAPEEPPVEQRRRRR

SEQ ID NO: 1251 - protein, 32 aa, synthetic construct
  REGION 1..32: note = Synthetic
GILDSFKGVAKGVAKDLAGKLLDKLKCKITGC

SEQ ID NO: 1252 - protein, 11 aa, synthetic construct
  REGION 1..11: note = Synthetic
AHQVLATLFRI

SEQ ID NO: 1253 - protein, 29 aa, synthetic construct
  REGION 1..29: note = Synthetic
GLWKSLLKNVGKAAGKAALNAVTDMVNQA

SEQ ID NO: 1254 - protein, 29 aa, synthetic construct
  REGION 1..29: note = Synthetic
GLWKSLLKNVGKAAGKAALNAVTDMVNQS

SEQ ID NO: 1255 - protein, 29 aa, synthetic construct
  REGION 1..29: note = Synthetic
RGLMDTVKNVAKNLAGHMLDKLKCKITGC

SEQ ID NO: 1256 - protein, 15 aa, synthetic construct
  REGION 1..15: note = Synthetic
LFDIAKKVIGVIGSL

SEQ ID NO: 1257 - protein, 29 aa, synthetic construct
  REGION 1..29: note = Synthetic
GMFTNMLKGIGKLAGQAALGAVKTLAGEQ

SEQ ID NO: 1258 - protein, 22 aa, synthetic construct
  REGION 1..22: note = Synthetic
DAIEYFWQRFDTFLNNINENNP

SEQ ID NO: 1259 - protein, 42 aa, synthetic construct
  REGION 1..42: note = Synthetic
CAGLYKKCGKGVNTCCENRPCKCDLAMGNCICKKKFVEFFGG

SEQ ID NO: 1260 - protein, 41 aa, synthetic construct
  REGION 1..41: note = Synthetic
EKGMKALKNYANDVLNGPAEAPAPAAAAPEEPPVEQRRRRR

SEQ ID NO: 1261 - protein, 12 aa, synthetic construct
  REGION 1..12: note = Synthetic
WKAIIEAAKQAL

SEQ ID NO: 1262 - protein, 15 aa, synthetic construct
  REGION 1..15: note = Synthetic
LLEKLAKKFKGCKNK

SEQ ID NO: 1263 - protein, 15 aa, synthetic construct
  REGION 1..15: note = Synthetic
YSRGCSRITRCRRDA

SEQ ID NO: 1264 - protein, 22 aa, synthetic construct
  REGION 1..22: note = Synthetic
CKKVARVLYHLFYGIVKSVCVG

SEQ ID NO: 1265 - protein, 35 aa, synthetic construct
  REGION 1..35: note = Synthetic
VAASVRKICEKCRLIRRRGRLLVICSNPKHKQRQG

SEQ ID NO: 1266 - protein, 20 aa, synthetic construct
  REGION 1..20: note = Synthetic
LERISSFASSFINDLQDRVL

SEQ ID NO: 1267 - protein, 42 aa, synthetic construct; identical to SEQ ID NO: 1162
  REGION 1..42: note = Synthetic

SEQ ID NO: 1268 - protein, 26 aa, synthetic construct
  REGION 1..26: note = Synthetic
TTLKDFLKSLKRIMQKKYWQCESSLF

SEQ ID NO: 1269 - protein, 22 aa, synthetic construct
  REGION 1..22: note = Synthetic
RKLYNIIRRWPEWLENVDSYKK

SEQ ID NO: 1270 - protein, 36 aa, synthetic construct
  REGION 1..36: note = Synthetic
ILSLFTGGIKALGKTLFKMAGKAGAEHLACKATNQC

SEQ ID NO: 1271 - protein, 14 aa, synthetic construct
  REGION 1..14: note = Synthetic
IAKAVLSVVGQLVG

SEQ ID NO: 1272 - protein, 21 aa, synthetic construct
  REGION 1..21: note = Synthetic
KCFQHLDDCCSRKCNRFNKCV

SEQ ID NO: 1273 - protein, 14 aa, synthetic construct
  REGION 1..14: note = Synthetic
LEKLAKKFKGCKNK

SEQ ID NO: 1274 - protein, 29 aa, synthetic construct
  REGION 1..29: note = Synthetic
KEFLERFKSLLQKMIHQHLSSRTHGSEDS

SEQ ID NO: 1275 - protein, 29 aa, synthetic construct
  REGION 1..29: note = Synthetic
KEFLERFKSLLQKMIHQHLSSRTHGSEDS

SEQ ID NO: 1276 - protein, 29 aa, synthetic construct
  REGION 1..29: note = Synthetic
KEFLERFKSLLQKMIHQHLSSRTHGSEDS

SEQ ID NO: 1277 - protein, 13 aa, synthetic construct
  REGION 1..13: note = Synthetic
MKHLDQIFQNLKP

SEQ ID NO: 1278 - protein, 13 aa, synthetic construct
  REGION 1..13: note = Synthetic
LLKIAAKVGSNLL

SEQ ID NO: 1279 - protein, 26 aa, synthetic construct
  REGION 1..26: note = Synthetic
GLWKNMLSGIGKLAGEAALGAVKTLV

SEQ ID NO: 1280 - protein, 19 aa, synthetic construct
  REGION 1..19: note = Synthetic
QKCVQQLESLLQKAISRLA

SEQ ID NO: 1281 - protein, 20 aa, synthetic construct
  REGION 1..20: note = Synthetic
REFLERMKSLLQKMIHQHLS

SEQ ID NO: 1282 - protein, 15 aa, synthetic construct
  REGION 1..15: note = Synthetic
QELFSLLKRLINKVN

SEQ ID NO: 1283 - protein, 17 aa, synthetic construct
  REGION 1..17: note = Synthetic
KKWVQKYISLLKTPKQL

SEQ ID NO: 1284 - protein, 13 aa, synthetic construct
  REGION 1..13: note = Synthetic
IVSGAVSLVKKLG

SEQ ID NO: 1285 - protein, 20 aa, synthetic construct
  REGION 1..20: note = Synthetic
KVFNNCHHFVYSLYNKIKQK

SEQ ID NO: 1286 - protein, 19 aa, synthetic construct
  REGION 1..19: note = Synthetic
REFLNNWITFCQSIFSTLP

SEQ ID NO: 1287 - protein, 19 aa, synthetic construct
  REGION 1..19: note = Synthetic
LLEKIKTCWNKILSGTKEH

SEQ ID NO: 1288 - protein, 35 aa, synthetic construct
  REGION 1..35: note = Synthetic
IAQLVKKWIKTVLEARSKFQASLNEYCRALTNNSA

SEQ ID NO: 1289 - protein, 25 aa, synthetic construct
  REGION 1..25: note = Synthetic
RFLGALFKVASKVLPSVFCAITKKC

SEQ ID NO: 1290 - protein, 15 aa, synthetic construct
  REGION 1..15: note = Synthetic
VKKIIEKMLKNGKSN

SEQ ID NO: 1291 - protein, 19 aa, synthetic construct
  REGION 1..19: note = Synthetic
LLQKIKTCWNKILRGAKEY

SEQ ID NO: 1292 - protein, 14 aa, synthetic construct
  REGION 1..14: note = Synthetic
AKKCCHKVHNCCSK

SEQ ID NO: 1293 - protein, 22 aa, synthetic construct
  REGION 1..22: note = Synthetic
RKLYNLIRRWPEWLENVDSYKQ

SEQ ID NO: 1294 - protein, 14 aa, synthetic construct
  REGION 1..14: note = Synthetic
SAGKAIHDLIRRRH

SEQ ID NO: 1295 - protein, 12 aa, synthetic construct
  REGION 1..12: note = Synthetic
EVLSKLKSLLQK

SEQ ID NO: 1296 - protein, 19 aa, synthetic construct
  REGION 1..19: note = Synthetic
KWVQDFMKHLDKKTQTPKL

SEQ ID NO: 1297 - protein, 13 aa, synthetic construct
  REGION 1..13: note = Synthetic
KTYTELFKEYFEK

SEQ ID NO: 1298 - protein, 13 aa, synthetic construct
  REGION 1..13: note = Synthetic
KTYTELFKEYFEK

SEQ ID NO: 1299 - protein, 42 aa, synthetic construct
  REGION 1..42: note = Synthetic
AVNELVGVMHRLSSNIRRKKKGSRCCFGGGDRLNQNYPARSI

SEQ ID NO: 1300 - protein, 23 aa, synthetic construct
  REGION 1..23: note = Synthetic
FKDWIKGAAKKLIKTVASSIANE

SEQ ID NO: 1301 - protein, 21 aa, synthetic construct
  REGION 1..21: note = Synthetic
STLKDLLERLKTIMKEKYSKC

SEQ ID NO: 1302 - protein, 25 aa, synthetic construct
  REGION 1..25: note = Synthetic
FFGSLLSLGSKLLPSVFKLFQRKKE

SEQ ID NO: 1303 - protein, 21 aa, synthetic construct
  REGION 1..21: note = Synthetic
LKDFLENLKRIMQKRYSKCRR

SEQ ID NO: 1304 - protein, 39 aa, synthetic construct
  REGION 1..39: note = Synthetic
QLQQVISRIYQTATHLPKVCNIPQVSVCPFQKTMPGPSY

SEQ ID NO: 1305 - protein, 20 aa, synthetic construct
  REGION 1..20: note = Synthetic
KEFLRSFEKLIQQVIRDDSS

SEQ ID NO: 1306 - protein, 19 aa, synthetic construct
  REGION 1..19: note = Synthetic
LLQKIKTCWNKILRGAKEY

SEQ ID NO: 1307 - protein, 19 aa, synthetic construct
  REGION 1..19: note = Synthetic
EKAADKAKKFGGKIKKWFG

SEQ ID NO: 1308 - protein, 21 aa, synthetic construct
  REGION 1..21: note = Synthetic
NKVFNNCHHFVYSLYNKIKQK

SEQ ID NO: 1309 - protein, 21 aa, synthetic construct
  REGION 1..21: note = Synthetic
NKVFNNCHHFVYSLYNKIKQK

SEQ ID NO: 1310 - protein, 17 aa, synthetic construct
  REGION 1..17: note = Synthetic
KIKRIVQKILESAERTA

SEQ ID NO: 1311 - protein, 13 aa, synthetic construct
  REGION 1..13: note = Synthetic
CKKFISELFGFGK

SEQ ID NO: 1312 - protein, 27 aa, synthetic construct
  REGION 1..27: note = Synthetic
YTTLKDFLESLRRIMQKKYWQCGSSTF

SEQ ID NO: 1313 - protein, 26 aa, synthetic construct
  REGION 1..26: note = Synthetic
TTLKDFLESLRRIMQKKYWQCGSSTF

SEQ ID NO: 1314 - protein, 20 aa, synthetic construct
  REGION 1..20: note = Synthetic
ARSCCSRLGRCCREAKGYSG

SEQ ID NO: 1315 - protein, 23 aa, synthetic construct
  REGION 1..23: note = Synthetic
EFFSRLDSFIQKAISKLRSSAAN

SEQ ID NO: 1316 - protein, 13 aa, synthetic construct
  REGION 1..13: note = Synthetic
LVSGAVSLVKKLG

SEQ ID NO: 1317 - protein, 42 aa, synthetic construct
  REGION 1..42: note = Synthetic
WASKIGQTLGKIAKVGLKELIQPKREAMLRSAEAQGKRPWIL

SEQ ID NO: 1318 - protein, 24 aa, synthetic construct
  REGION 1..24: note = Synthetic
LMSSIGKALGGLIVDVLKPKTPAS

SEQ ID NO: 1319 - protein, 24 aa, synthetic construct
  REGION 1..24: note = Synthetic
LMSSIGKALGGLIVDVLKPKTPAS

SEQ ID NO: 1320 - protein, 36 aa, synthetic construct
  REGION 1..36: note = Synthetic
KVYSSVRKICKSCGLIRRHGKLFVRCINSKHNQRQN

SEQ ID NO: 1321 - protein, 20 aa, synthetic construct
  REGION 1..20: note = Synthetic
KEYLERLKSLIQKMIHQHLS

SEQ ID NO: 1322 - protein, 23 aa, synthetic construct
  REGION 1..23: note = Synthetic
WGALAKGALKLIPSLFSSFSKKD

SEQ ID NO: 1323 - protein, 28 aa, synthetic construct
  REGION 1..28: note = Synthetic
QILNRCDKIWNYCSSLGSAPYVSKFDSV

SEQ ID NO: 1324 - protein, 14 aa, synthetic construct
  REGION 1..14: note = Synthetic
LEKLAKKFRGCKNK

SEQ ID NO: 1325 - protein, 33 aa, synthetic construct
  REGION 1..33: note = Synthetic
AVDTLCKLFRNYSNFLRGKLTLYTGEACRRRDR

SEQ ID NO: 1326 - protein, 29 aa, synthetic construct
  REGION 1..29: note = Synthetic
KVLSEAVEQCTKACSSVCTGGSTAAVKSA

SEQ ID NO: 1327 - protein, 29 aa, synthetic construct
  REGION 1..29: note = Synthetic
KVLSEAVEQCTKACSSVCTGGSTAAVKSA

SEQ ID NO: 1328 - protein, 34 aa, synthetic construct
  REGION 1..34: note = Synthetic
FKELERAGQRVRDAIISAGPAVATVGQAAAIARG

SEQ ID NO: 1329 - protein, 34 aa, synthetic construct
  REGION 1..34: note = Synthetic
FKELERAGQRVRDAIISAAPAVATVGQAAAIARG

SEQ ID NO: 1330 - protein, 33 aa, synthetic construct
  REGION 1..33: note = Synthetic
GIFDVVKGVLKGVGKNVAGSLLEQLKCKLSGGC

SEQ ID NO: 1331 - protein, 16 aa, synthetic construct
  REGION 1..16: note = Synthetic
RLQKIIQKILKKAKSS

SEQ ID NO: 1332 - protein, 14 aa, synthetic construct
  REGION 1..14: note = Synthetic
LEKLAKKFKGCKNK

SEQ ID NO: 1333 - protein, 14 aa, synthetic construct
  REGION 1..14: note = Synthetic
LEKLAKKFKGCKNK

SEQ ID NO: 1334 - protein, 19 aa, synthetic construct
  REGION 1..19: note = Synthetic
EKAADKAKKFGGKIKKWFG

SEQ ID NO: 1335 - protein, 21 aa, synthetic construct
  REGION 1..21: note = Synthetic
TIVEFLNKWITFCQSIFSTMT

SEQ ID NO: 1336 - protein, 16 aa, synthetic construct
  REGION 1..16: note = Synthetic
LSSVARTMIKRLEHFI

SEQ ID NO: 1337 - protein, 21 aa, synthetic construct
  REGION 1..21: note = Synthetic
GNGKRGCSRWCRDHSRCCGRR

SEQ ID NO: 1338 - protein, 20 aa, synthetic construct
  REGION 1..20: note = Synthetic
LRQYLKELNEYYAIMGRTRF

SEQ ID NO: 1339 - protein, 26 aa, synthetic construct
  REGION 1..26: note = Synthetic
VIDDLKKVAKKVRRELLCKKHHKKLN

SEQ ID NO: 1340 - protein, 28 aa, synthetic construct
  REGION 1..28: note = Synthetic
LCQQLISDIRNLQQKIRKCVCGEPQWMI

SEQ ID NO: 1341 - protein, 21 aa, synthetic construct
  REGION 1..21: note = Synthetic
EVAQFISKLLNYSKQLFRYGH

SEQ ID NO: 1342 - protein, 34 aa, synthetic construct
  REGION 1..34: note = Synthetic
KDCCHVINDLADDCFPIIFPGKPYIAALVKHACS

SEQ ID NO: 1343 - protein, 12 aa, synthetic construct
  REGION 1..12: note = Synthetic
INEAKDFLDKAK

SEQ ID NO: 1344 - protein, 22 aa, synthetic construct
  REGION 1..22: note = Synthetic
LDRICEDCYNLFREPQVHSLCM

SEQ ID NO: 1345 - protein, 39 aa, synthetic construct
  REGION 1..39: note = Synthetic
LLRGVLHMLDALLVHIEGHLRHLATQRQIQIKGTSTQSG

SEQ ID NO: 1346 - protein, 29 aa, synthetic construct
  REGION 1..29: note = Synthetic
SEFFNRLESLVQRLSGKLLCCHLVDLVPS

SEQ ID NO: 1347 - protein, 13 aa, synthetic construct
  REGION 1..13: note = Synthetic
KWVQDYIKDMKEN

SEQ ID NO: 1348 - protein, 14 aa, synthetic construct
  REGION 1..14: note = Synthetic
LNKAVGKVVDFVKS

SEQ ID NO: 1349 - protein, 18 aa, synthetic construct
  REGION 1..18: note = Synthetic
MKQIGTCVGRAVKCCRKK

SEQ ID NO: 1350 - protein, 16 aa, synthetic construct
  REGION 1..16: note = Synthetic
MLRDLRDAFSRVKTFF

SEQ ID NO: 1351 - protein, 29 aa, synthetic construct
  REGION 1..29: note = Synthetic
WKDWLKKGKEWLKAKGPGIVKAALQAATQ

SEQ ID NO: 1352 - protein, 12 aa, synthetic construct
  REGION 1..12: note = Synthetic
HCIKSIGRCVAH

SEQ ID NO: 1353 - protein, 20 aa, synthetic construct
  REGION 1..20: note = Synthetic
FLDALKKFAKGGMNAVLNPK

SEQ ID NO: 1354 - protein, 27 aa, synthetic construct
  REGION 1..27: note = Synthetic
SCWTRVTSAFESITQLFRLYFARRLVG

SEQ ID NO: 1355 - protein, 18 aa, synthetic construct
  REGION 1..18: note = Synthetic
FIKKLMTFIQKVLKNTRV

SEQ ID NO: 1356 - protein, 12 aa, synthetic construct
  REGION 1..12: note = Synthetic
HCIKSIGRCVAH

SEQ ID NO: 1357 - protein, 20 aa, synthetic construct
  REGION 1..20: note = Synthetic
MAKYAAELRRYINRLTRPRY

SEQ ID NO: 1358 - protein, 34 aa, synthetic construct
  REGION 1..34: note = Synthetic
IQNLYNIITRICYRVGASGGLVTFSLLSSSCSSS

SEQ ID NO: 1359 - protein, 12 aa, synthetic construct
  REGION 1..12: note = Synthetic
AVLNKVTDMVNQ

SEQ ID NO: 1360 - protein, 19 aa, synthetic construct
  REGION 1..19: note = Synthetic
EKAADKAKKFGGKIKKWFG

SEQ ID NO: 1361 - protein, 19 aa, synthetic construct
  REGION 1..19: note = Synthetic
EKAADKAKKFGGKIKKWFG

SEQ ID NO: 1362 - protein, 16 aa, synthetic construct
  REGION 1..16: note = Synthetic
MLRDLRDAFSRVKTFF

SEQ ID NO: 1363 - protein, 33 aa, synthetic construct
  REGION 1..33: note = Synthetic
GLFDVVKGVLKGVGKNVAGSLLEQLKCKLSGGC

SEQ ID NO: 1364 - protein, 35 aa, synthetic construct
  REGION 1..35: note = Synthetic
IEKWEKIIYNICNNAFLLKGSMPINLRKRHKWMNI

SEQ ID NO: 1365 - protein, 37 aa, synthetic construct
  REGION 1..37: note = Synthetic
RKAINELIKVMNDLSPKSNLRKRKRSQNLFRGRRASM

SEQ ID NO: 1366 - protein, 19 aa, synthetic construct
  REGION 1..19: note = Synthetic
EKAADKAKKFGGKIKKWFG

SEQ ID NO: 1367 - protein, 19 aa, synthetic construct
  REGION 1..19: note = Synthetic
EKAADKAKKFGGKIKKWFG

SEQ ID NO: 1368 - protein, 11 aa, synthetic construct
  REGION 1..11: note = Synthetic
AVKKYLNSVLT

SEQ ID NO: 1369 - protein, 11 aa, synthetic construct
  REGION 1..11: note = Synthetic
AVKKYLNSVLT

SEQ ID NO: 1370 - protein, 11 aa, synthetic construct
  REGION 1..11: note = Synthetic
AVKKYLNSVLT

SEQ ID NO: 1371 - protein, 11 aa, synthetic construct
  REGION 1..11: note = Synthetic
AVKKYLNSVLT

SEQ ID NO: 1372 - protein, 15 aa, synthetic construct
  REGION 1..15: note = Synthetic
ILSFIKGLAEHLGKK

SEQ ID NO: 1373 - protein, 38 aa, synthetic construct
  REGION 1..38: note = Synthetic
LEEARQAFQTFKPDWNKIRYDAMKMQTSLGQMKKRFNL

SEQ ID NO: 1374 - protein, 12 aa, synthetic construct
  REGION 1..12: note = Synthetic
YSKVLAIAQNFV

SEQ ID NO: 1375 - protein, 37 aa, synthetic construct
  REGION 1..37: note = Synthetic
RKAINELIKVMNDLSPRSNLRKRKRSQNLFRGRRASK

SEQ ID NO: 1376 - protein, 37 aa, synthetic construct; identical to SEQ ID NO: 1375
  REGION 1..37: note = Synthetic

SEQ ID NO: 1377 - protein, 19 aa, synthetic construct
  REGION 1..19: note = Synthetic
EKAVDKAKKFGGKIKKWFG

SEQ ID NO: 1378 - protein, 24 aa, synthetic construct
  REGION 1..24: note = Synthetic
LDTLKGLAGKLLQGLKCIKAGCKP

SEQ ID NO: 1379 - protein, 33 aa, synthetic construct
  REGION 1..33: note = Synthetic
RKAVSELFSVLQKLVETSTSKRKRSQSPKRCRC

SEQ ID NO: 1380 - protein, 29 aa, synthetic construct
  REGION 1..29: note = Synthetic
FLKGVGTTLASVGKVVSDQFGKLLQAGQG

SEQ ID NO: 1381 - protein, 15 aa, synthetic construct
  REGION 1..15: note = Synthetic
IKKIVQKILDSGKNN

SEQ ID NO: 1382 - protein, 15 aa, synthetic construct
  REGION 1..15: note = Synthetic
DCCSDFCSTMSDVCQ

SEQ ID NO: 1383 - protein, 32 aa, synthetic construct
  REGION 1..32: note = Synthetic
GILSTFKGLAKGVAKDLAGNLLDKFKCKITGC

SEQ ID NO: 1384 - protein, 16 aa, synthetic construct
  REGION 1..16: note = Synthetic
LKKVIQKILDSGNKKN

SEQ ID NO: 1385 - protein, 21 aa, synthetic construct
  REGION 1..21: note = Synthetic
LKDFLENLKRIMQKRYSKCRR

SEQ ID NO: 1386 - protein, 34 aa, synthetic construct
  REGION 1..34: note = Synthetic
RKAVHELFSVLQRLVETPTAFKRKRSQSQRRCKC

SEQ ID NO: 1387 - protein, 19 aa, synthetic construct
  REGION 1..19: note = Synthetic
KWVQNYMKHLGRKAHTLKT

SEQ ID NO: 1388 - protein, 28 aa, synthetic construct
  REGION 1..28: note = Synthetic
ILDSLKNFAKDAAGILLKKASCKLSGQC

SEQ ID NO: 1389 - protein, 11 aa, synthetic construct
  REGION 1..11: note = Synthetic
ELVSGIVEGVK

SEQ ID NO: 1390 - protein, 11 aa, synthetic construct
  REGION 1..11: note = Synthetic
ELVSGIVEGVK

SEQ ID NO: 1391 - protein, 11 aa, synthetic construct
  REGION 1..11: note = Synthetic
ELVSGIVEGVK

SEQ ID NO: 1392 - protein, 28 aa, synthetic construct
  REGION 1..28: note = Synthetic
KQIFYRLDRICEDCYSLFQEPQILSFCK

SEQ ID NO: 1393 - protein, 36 aa, synthetic construct
  REGION 1..36: note = Synthetic
LFSVVTGVLKAVGKNVAKNVGGSLLEQLKCKISGGC

SEQ ID NO: 1394 - protein, 24 aa, synthetic construct
  REGION 1..24: note = Synthetic
LLKELWTKMKGAGKAVLGKIKGLL

SEQ ID NO: 1395 - protein, 22 aa, synthetic construct
  REGION 1..22: note = Synthetic
RQFLDYLQEFLGVMGTEWTMEH

SEQ ID NO: 1396 - protein, 21 aa, synthetic construct
  REGION 1..21: note = Synthetic
STLKDLLERLKTIMKEKYSKC

SEQ ID NO: 1397 - protein, 32 aa, synthetic construct
  REGION 1..32: note = Synthetic
QQVQHVFQTAKNLPNVCKIPTVGSCQFKASPY

SEQ ID NO: 1398 - protein, 37 aa, synthetic construct
  REGION 1..37: note = Synthetic
RKAINELIKVMNDLSPRSNLRKRKRSHSLFRGRRASK

SEQ ID NO: 1399 - protein, 37 aa, synthetic construct
  REGION 1..37: note = Synthetic
RKAINELIKVMNDLSPRSNLTKRKRSQNLFRGRRASK

SEQ ID NO: 1400 - protein, 37 aa, synthetic construct; identical to SEQ ID NO: 1365
  REGION 1..37: note = Synthetic

SEQ ID NO: 1401 - protein, 37 aa, synthetic construct; identical to SEQ ID NO: 1365
  REGION 1..37: note = Synthetic

SEQ ID NO: 1402 - protein, 37 aa, synthetic construct
  REGION 1..37: note = Synthetic
RKAINELIKVMNDLSPKSNLRKRKRSQNLFRGRRAST

SEQ ID NO: 1403 - protein, 37 aa, synthetic construct; identical to SEQ ID NO: 1365
  REGION 1..37: note = Synthetic

SEQ ID NO: 1404 - protein, 16 aa, synthetic construct
  REGION 1..16: note = Synthetic
NLLRQLHTIMRDIENN

SEQ ID NO: 1405 - protein, 31 aa, synthetic construct
  REGION 1..31: note = Synthetic
KWNNAVDSVFTTIENVPSSVNTVANRLINNK

SEQ ID NO: 1406 - protein, 26 aa, synthetic construct
  REGION 1..26: note = Synthetic
FFTELGASLASLFTSWFPTTTTERNH

SEQ ID NO: 1407 - protein, 26 aa, synthetic construct
  REGION 1..26: note = Synthetic
FFTELGASLASLFTSWFPATTTERNH

SEQ ID NO: 1408 - protein, 12 aa, synthetic construct
  REGION 1..12: note = Synthetic
IATGIAALAKHL

SEQ ID NO: 1409 - protein, 26 aa, synthetic construct
  REGION 1..26: note = Synthetic
ALWKDMLSGIGKLAGQAALGAVKTLV

SEQ ID NO: 1410 - protein, 37 aa, synthetic construct; identical to SEQ ID NO: 1365
  REGION 1..37: note = Synthetic

SEQ ID NO: 1411 - protein, 12 aa, synthetic construct
  REGION 1..12: note = Synthetic
LFDIIKKIAESI

SEQ ID NO: 1412 - protein, 18 aa, synthetic construct
  REGION 1..18: note = Synthetic
FDRVLQELKDIARENLGS

SEQ ID NO: 1413 - protein, 12 aa, synthetic construct
  REGION 1..12: note = Synthetic
LFDIIKKIAESF

SEQ ID NO: 1414 - protein, 16 aa, synthetic construct
  REGION 1..16: note = Synthetic
GALKGLAKGLAEHFAN

SEQ ID NO: 1415 - protein, 35 aa, synthetic construct
  REGION 1..35: note = Synthetic
RLASLLETLIKEAEKLTQCTRRLNAIDGLTDIFQR

SEQ ID NO: 1416 - protein, 26 aa, synthetic construct
  REGION 1..26: note = Synthetic
IYEMLKDIFHVFKKGYSNPDWNNTIV

SEQ ID NO: 1417 - protein, 26 aa, synthetic construct
  REGION 1..26: note = Synthetic
IYEMLKDIFHVFKKGYSNPDWNNTIV

SEQ ID NO: 1418 - protein, 28 aa, synthetic construct
  REGION 1..28: note = Synthetic
LWSKIKTAGKSVAKAAAKAAVKAVTNAV

SEQ ID NO: 1419 - protein, 19 aa, synthetic construct
  REGION 1..19: note = Synthetic
EKAADKAKKFGGKIKRWFG

SEQ ID NO: 1420 - protein, 38 aa, synthetic construct; identical to SEQ ID NO: 1373
  REGION 1..38: note = Synthetic

SEQ ID NO: 1421 - protein, 28 aa, synthetic construct
  REGION 1..28: note = Synthetic
AVWKDFLKNIGKAAGKAVLNSVTDMVNE

SEQ ID NO: 1422 - protein, 28 aa, synthetic construct
  REGION 1..28: note = Synthetic
ILDSLKNLAKNAAQILLNKASCKLSGQC

SEQ ID NO: 1423 - protein, 32 aa, synthetic construct
  REGION 1..32: note = Synthetic
LISAVRTLMRTWKSLTIRYSTPHRYQYTGHTV

SEQ ID NO: 1424 - protein, 28 aa, synthetic construct
  REGION 1..28: note = Synthetic
ILDSLKNLAKNAGQILLNKASCKLSGQC

SEQ ID NO: 1425 - protein, 23 aa, synthetic construct
  REGION 1..23: note = Synthetic
EVIQLVKNLLTYVRGVYRHGNFR

SEQ ID NO: 1426 - protein, 13 aa, synthetic construct
  REGION 1..13: note = Synthetic
ILDAIKAIAKAAG

SEQ ID NO: 1427 - protein, 22 aa, synthetic construct
  REGION 1..22: note = Synthetic
VANPYRRGCGTIERCRRDTGRK

SEQ ID NO: 1428 - protein, 19 aa, synthetic construct
  REGION 1..19: note = Synthetic
EKAADKAKKFGGKIKKWFG

SEQ ID NO: 1429 - protein, 19 aa, synthetic construct
  REGION 1..19: note = Synthetic
EKAADKAKKFGGKIKKWFG

SEQ ID NO: 1430 - protein, 19 aa, synthetic construct
  REGION 1..19: note = Synthetic
EKAADKAKKFGGKIKKWFG

SEQ ID NO: 1431 - protein, 19 aa, synthetic construct
  REGION 1..19: note = Synthetic
EKAADKAKKFGGKIKKWFG

SEQ ID NO: 1432 - protein, 19 aa, synthetic construct
  REGION 1..19: note = Synthetic
EKAADKAKKFGGKIKKWFG

SEQ ID NO: 1433 - protein, 19 aa, synthetic construct
  REGION 1..19: note = Synthetic
EKAADKAKKFGGKIKKWFG

SEQ ID NO: 1434 - protein, 19 aa, synthetic construct
  REGION 1..19: note = Synthetic
EKAADKAKKFGGKIKKWFG

SEQ ID NO: 1435 - protein, 19 aa, synthetic construct
  REGION 1..19: note = Synthetic
EKAADKAKKFGGKIKKWFG

SEQ ID NO: 1436 - protein, 19 aa, synthetic construct
  REGION 1..19: note = Synthetic
EKAADKAKKFGGKIKKWFG

SEQ ID NO: 1437 - protein, 20 aa, synthetic construct
  REGION 1..20: note = Synthetic
HEFLNSLRSFLQKVFLLLFS

SEQ ID NO: 1438 - protein, 20 aa, synthetic construct
  REGION 1..20: note = Synthetic
ARSCCSRLGRCCREAKGYSG

SEQ ID NO: 1439 - protein, 23 aa, synthetic construct
  REGION 1..23: note = Synthetic
EAIAAIYKAIQNEAERFIMCQKN

SEQ ID NO: 1440 - protein, 31 aa, synthetic construct
  REGION 1..31: note = Synthetic
LGGFLKGVGKVLAGVGKVVADQFGNLLEAGQ

SEQ ID NO: 1441 - protein, 25 aa, synthetic construct
  REGION 1..25: note = Synthetic
LLQQLQQLLQQLQQLLLLPLYRNAN

SEQ ID NO: 1442 - protein, 32 aa, synthetic construct
  REGION 1..32: note = Synthetic
MRNYMKRYLNLGESVYDYSVATCGSSTYFARK

SEQ ID NO: 1443 - protein, 28 aa, synthetic construct
  REGION 1..28: note = Synthetic
DCYRRFEKGVEKGQKCWCIETGVTFSKE

SEQ ID NO: 1444 - protein, 28 aa, synthetic construct
  REGION 1..28: note = Synthetic
DCYRRFEKGVEKGQKCWCIETGVTFSKE

SEQ ID NO: 1445 - protein, 23 aa, synthetic construct
  REGION 1..23: note = Synthetic
FLKRLLQEIKTCWNKILMGTKEH

SEQ ID NO: 1446 - protein, 33 aa, synthetic construct
  REGION 1..33: note = Synthetic
IFTECKSACEKLKKPVASLCLPPKTCRCYHFCS

SEQ ID NO: 1447 - protein, 23 aa, synthetic construct
  REGION 1..23: note = Synthetic
IRYILHSFLKVLHHLREQKGKCA

SEQ ID NO: 1448 - protein, 16 aa, synthetic construct
  REGION 1..16: note = Synthetic
LEYMEKAADKIKNLFG

SEQ ID NO: 1449 - protein, 33 aa, synthetic construct
  REGION 1..33: note = Synthetic
ASVRKMCEKCRTIRRKGRVMVICSNSKHKQRQG

SEQ ID NO: 1450 - protein, 19 aa, synthetic construct
  REGION 1..19: note = Synthetic
EKAADKAKKFGGKIKKWFG

SEQ ID NO: 1451 - protein, 37 aa, synthetic construct
  REGION 1..37: note = Synthetic
RKAISELIRVMKDLSPRSNLRKRRRSQNLFRGQRASK

SEQ ID NO: 1452 - protein, 13 aa, synthetic construct
  REGION 1..13: note = Synthetic
IPGAISAIASLFK

SEQ ID NO: 1453 - protein, 28 aa, synthetic construct
  REGION 1..28: note = Synthetic
ALWKTLLKNVGKAAGKAALNAVTDMVNQ

SEQ ID NO: 1454 - protein, 33 aa, synthetic construct
  REGION 1..33: note = Synthetic
GLLSGLKKVGKHVAKNVAVSLMDSLKCKISGDC

SEQ ID NO: 1455 - protein, 25 aa, synthetic construct
  REGION 1..25: note = Synthetic
FFTELGASLASILTSWFPANTERNH

SEQ ID NO: 1456 - protein, 37 aa, synthetic construct
  REGION 1..37: note = Synthetic
RKAISELIKVMNDLSPKANLRKRKRSQNPFRGRRALQ

SEQ ID NO: 1457 - protein, 37 aa, synthetic construct; identical to SEQ ID NO: 1456
  REGION 1..37: note = Synthetic

SEQ ID NO: 1458 - protein, 23 aa, synthetic construct
  REGION 1..23: note = Synthetic
STLEDFLERLKTIMKEKYSKCRR

SEQ ID NO: 1459 - protein, 23 aa, synthetic construct
  REGION 1..23: note = Synthetic
STLEDFLERLKTIMKEKYSKCRR

SEQ ID NO: 1460 - protein, 20 aa, synthetic construct
  REGION 1..20: note = Synthetic
KEFLERLKSLIQRMIYQHLS

SEQ ID NO: 1461 - protein, 35 aa, synthetic construct
  REGION 1..35: note = Synthetic
LWSKIKEVGKEAAKAAAKAAGKAALGAVSEAVGEQ

SEQ ID NO: 1462 - protein, 30 aa, synthetic construct
  REGION 1..30: note = Synthetic
GWKDWAKKAGGWLKKKGPGMAKAALKAAMQ

SEQ ID NO: 1463 - protein, 13 aa, synthetic construct
  REGION 1..13: note = Synthetic
YSRGCSAITRCRR

SEQ ID NO: 1464 - protein, 28 aa, synthetic construct
  REGION 1..28: note = Synthetic
EVTQFIKTLLQHSRNVFHYRSFNWSKKS

SEQ ID NO: 1465 - protein, 28 aa, synthetic construct
  REGION 1..28: note = Synthetic
EVTQFIKTLLQHSRNVFHYRSFNWSKKS

SEQ ID NO: 1466 - protein, 22 aa, synthetic construct
  REGION 1..22: note = Synthetic
ILSAGKSALKGLAKGLAEHFAN

SEQ ID NO: 1467 - protein, 36 aa, synthetic construct
  REGION 1..36: note = Synthetic
QMVSRIYQTATHLPKVCNIPQVSVCPFQKTMPGPSY

SEQ ID NO: 1468 - protein, 35 aa, synthetic construct; identical to SEQ ID NO: 5
  REGION 1..35: note = Synthetic

SEQ ID NO: 1469 - protein, 33 aa, synthetic construct
  REGION 1..33: note = Synthetic
FLDQIIRDFRNFIYQKYRRLRDEFRKLRDILSG

SEQ ID NO: 1470 - protein, 17 aa, synthetic construct
  REGION 1..17: note = Synthetic
KIKRMIQKMLSSAERTA

SEQ ID NO: 1471 - protein, 15 aa, synthetic construct
  REGION 1..15: note = Synthetic
RFASHISKCLERKRK

SEQ ID NO: 1472 - protein, 23 aa, synthetic construct
  REGION 1..23: note = Synthetic
EVAQFLKDLLRHSRIVFRNERFN

SEQ ID NO: 1473 - protein, 18 aa, synthetic construct
  REGION 1..18: note = Synthetic
LQSILELVHRVLRHLAQP

SEQ ID NO: 1474 - protein, 24 aa, synthetic construct
  REGION 1..24: note = Synthetic
RALSAICEVASETCTAWMSRQESN

SEQ ID NO: 1475 - protein, 21 aa, synthetic construct
  REGION 1..21: note = Synthetic
STLRDFLERLKAIVQRKYYRH

SEQ ID NO: 1476 - protein, 21 aa, synthetic construct
  REGION 1..21: note = Synthetic
STLKNLLERLKTIMKEKYSKC

SEQ ID NO: 1477 - protein, 21 aa, synthetic construct
  REGION 1..21: note = Synthetic
STLKNLLERLKTIMKEKYSKC

SEQ ID NO: 1478 - protein, 17 aa, synthetic construct
  REGION 1..17: note = Synthetic
DLLERLKTIMKEKYSKC

SEQ ID NO: 1479 - protein, 17 aa, synthetic construct
  REGION 1..17: note = Synthetic
DLLERLKTIMKEKYSKC

SEQ ID NO: 1480 - protein, 17 aa, synthetic construct
  REGION 1..17: note = Synthetic
DLLERLKTIMKEKYSKC

SEQ ID NO: 1481 - protein, 21 aa, synthetic construct
  REGION 1..21: note = Synthetic
IGSALKVLAGVLPSIVSWVKQ

SEQ ID NO: 1482 - protein, 20 aa, synthetic construct
  REGION 1..20: note = Synthetic
KEFLERLKSLLQKMIHQRLS

SEQ ID NO: 1483 - protein, 24 aa, synthetic construct
  REGION 1..24: note = Synthetic
LASTLGSFLGKFAKGGAQAFLQPK

SEQ ID NO: 1484 - protein, 21 aa, synthetic construct
  REGION 1..21: note = Synthetic
STLKDLLERLKTIMKEKYSKC

SEQ ID NO: 1485 - protein, 21 aa, synthetic construct
  REGION 1..21: note = Synthetic
STLKDLLERLKTIMKEKYSKC

SEQ ID NO: 1486 - protein, 21 aa, synthetic construct
  REGION 1..21: note = Synthetic
STLKDLLERLKTIMKEKYSKC

SEQ ID NO: 1487 - protein, 21 aa, synthetic construct
  REGION 1..21: note = Synthetic
STLKDLLERLKTIMKEKYSKC

SEQ ID NO: 1488 - protein, 21 aa, synthetic construct
  REGION 1..21: note = Synthetic
STLKDLLERLKTIMKEKYSKC

SEQ ID NO: 1489 - protein, 21 aa, synthetic construct
  REGION 1..21: note = Synthetic
STLKDLLERLKTIMKEKYSKC

SEQ ID NO: 1490 - protein, 21 aa, synthetic construct
  REGION 1..21: note = Synthetic
STLKDLLERLKTIMKEKYSKC

SEQ ID NO: 1491 - protein, 21 aa, synthetic construct
  REGION 1..21: note = Synthetic
STLKDLLERLKTIMKEKYSKC

SEQ ID NO: 1492 - protein, 21 aa, synthetic construct
  REGION 1..21: note = Synthetic
STLKDLLERLKTIMKEKYSKC

SEQ ID NO: 1493 - protein, 21 aa, synthetic construct
  REGION 1..21: note = Synthetic
STLKDLLERLKTIMKEKYSKC

SEQ ID NO: 1494 - protein, 21 aa, synthetic construct
  REGION 1..21: note = Synthetic
STLKDLLERLKTIMKEKYSKC

SEQ ID NO: 1495 - protein, 40 aa, synthetic construct
  REGION 1..40: note = Synthetic
MLDGLNDYCTGITSDCPRNPWKSEEDEMKWSATAKGSVLM

SEQ ID NO: 1496 - protein, 21 aa, synthetic construct
  REGION 1..21: note = Synthetic
LNRLKQFMQKLIDNLDQLKIC

SEQ ID NO: 1497 - protein, 23 aa, synthetic construct
  REGION 1..23: note = Synthetic
FLKRLLQEIKTCWNKILSGTKEH

SEQ ID NO: 1498 - protein, 36 aa, synthetic construct
  REGION 1..36: note = Synthetic
IFTLIKGAAKLIGKTVAKEAGKTGLELMACKITNQC

SEQ ID NO: 1499 - protein, 32 aa, synthetic construct
  REGION 1..32: note = Synthetic
RSIWEGIKNAGKGFLVSILDKVRCKVAGGCNP

SEQ ID NO: 1500 - protein, 23 aa, synthetic construct
  REGION 1..23: note = Synthetic
KNATTFIKKLMTFIRKASKPARV

SEQ ID NO: 1501 - protein, 21 aa, synthetic construct
  REGION 1..21: note = Synthetic
STLKDFLERLKTIMKEKYSKC

SEQ ID NO: 1502 - protein, 14 aa, synthetic construct
  REGION 1..14: note = Synthetic
YRRGCSKITRCKRD

SEQ ID NO: 1503 - protein, 36 aa, synthetic construct
  REGION 1..36: note = Synthetic
QMVSRIYQTATHLPKVCKIPQVSVCPFQKTMPGPSY

SEQ ID NO: 1504 - protein, 12 aa, synthetic construct
  REGION 1..12: note = Synthetic
GIGSCCARGWRS

SEQ ID NO: 1505 - protein, 37 aa, synthetic construct
  REGION 1..37: note = Synthetic
RKAISELIKVMNDLSPRSNLRKRKRSQTMFQGQRASK

SEQ ID NO: 1506 - protein, 28 aa, synthetic construct
  REGION 1..28: note = Synthetic
KYWTECCGRIGPHCSRCICPEVACPKNG

SEQ ID NO: 1507 - protein, 12 aa, synthetic construct
  REGION 1..12: note = Synthetic
ALVGQFGKMLNE

SEQ ID NO: 1508 - protein, 18 aa, synthetic construct
  REGION 1..18: note = Synthetic
KCVRFVKKVGEKVIEKVG

SEQ ID NO: 1509 - protein, 37 aa, synthetic construct
  REGION 1..37: note = Synthetic
RKAINELFKVMNDLSPRSNLRKRKRSQNLFRGRRASK

SEQ ID NO: 1510 - protein, 28 aa, synthetic construct
  REGION 1..28: note = Synthetic
LWSKIKEAGKAAVKAAGKAALGAVANSV

SEQ ID NO: 1511 - protein, 13 aa, synthetic construct
  REGION 1..13: note = Synthetic
NVLHSIISICRIF

SEQ ID NO: 1512 - protein, 17 aa, synthetic construct
  REGION 1..17: note = Synthetic
DLLERLKTIMREKYSKC

SEQ ID NO: 1513 - protein, 13 aa, synthetic construct
  REGION 1..13: note = Synthetic
KWVREYINTLEMS

SEQ ID NO: 1514 - protein, 24 aa, synthetic construct
  REGION 1..24: note = Synthetic
IPAYYKRCARLLTRLAVSPMCMER

SEQ ID NO: 1515 - protein, 24 aa, synthetic construct
  REGION 1..24: note = Synthetic
IPAYYKRCARLLTRLAVSPMCMER

SEQ ID NO: 1516 - protein, 21 aa, synthetic construct
  REGION 1..21: note = Synthetic
STLRDLLERLKTIMREKYSKC

SEQ ID NO: 1517 - protein, 42 aa, synthetic construct
  REGION 1..42: note = Synthetic
FGNTMGDKAREVIDRIKQSDIPAKTRNWFSETFQKVKEKLKI

SEQ ID NO: 1518 - protein, 23 aa, synthetic construct
  REGION 1..23: note = Synthetic
STLEDFLERLKTIMKEKYSKCRS

SEQ ID NO: 1519 - protein, 23 aa, synthetic construct
  REGION 1..23: note = Synthetic
STLEDFLERLKTIMKEKYSKCRS

SEQ ID NO: 1520 - protein, 23 aa, synthetic construct
  REGION 1..23: note = Synthetic
STLEDFLERLKTIMKEKYSKCRS

SEQ ID NO: 1521 - protein, 24 aa, synthetic construct
  REGION 1..24: note = Synthetic
TTVKKAVKYLRTIMKSHDPRVQES

SEQ ID NO: 1522 - protein, 14 aa, synthetic construct
  REGION 1..14: note = Synthetic
TVKNCGKKLLATPR

SEQ ID NO: 1523 - protein, 37 aa, synthetic construct
  REGION 1..37: note = Synthetic
RKAISELIKVMNDLSPKSNLRKRKRRQNQIQGRRASK

SEQ ID NO: 1524 - protein, 12 aa, synthetic construct
  REGION 1..12: note = Synthetic
SFLTRLTGYLRE

SEQ ID NO: 1525 - protein, 23 aa, synthetic construct
  REGION 1..23: note = Synthetic
STLENFLERLKTIMREKYSKCSS

SEQ ID NO: 1526 - protein, 24 aa, synthetic construct
  REGION 1..24: note = Synthetic
LVSSIGRALGGLLADVVKSKEQPA

SEQ ID NO: 1527 - protein, 24 aa, synthetic construct
  REGION 1..24: note = Synthetic
LVSSIGRALGGLLADVVKSKEQPA

SEQ ID NO: 1528 - protein, 23 aa, synthetic construct
  REGION 1..23: note = Synthetic
STLEDFLERLKTIMREKYSKCSS

SEQ ID NO: 1529 - protein, 17 aa, synthetic construct
  REGION 1..17: note = Synthetic
IVEFLNRWITFCQSIIS

SEQ ID NO: 1530 - protein, 29 aa, synthetic construct
  REGION 1..29: note = Synthetic
RGIMDTVKNAAKDLAGQLLDKLKCKITAC

SEQ ID NO: 1531 - protein, 17 aa, synthetic construct
  REGION 1..17: note = Synthetic
RLFDNILGDVVQIPRVA

SEQ ID NO: 1532 - protein, 21 aa, synthetic construct
  REGION 1..21: note = Synthetic
STLKDFLERLKTIMREKYSKC

SEQ ID NO: 1533 - protein, 13 aa, synthetic construct
  REGION 1..13: note = Synthetic
YSRGCSSITRCRR

SEQ ID NO: 1534 - protein, 37 aa, synthetic construct
  REGION 1..37: note = Synthetic
RKAINELIKVMNDLSPKSNLIKRKRSQNLFRGRRASM

SEQ ID NO: 1535 - protein, 19 aa, synthetic construct
  REGION 1..19: note = Synthetic
LKDFLERLKAIMQKKYSKH

SEQ ID NO: 1536 - protein, 21 aa, synthetic construct
  REGION 1..21: note = Synthetic
STLRDLLERLKTIMKEKYSKC

SEQ ID NO: 1537 - protein, 21 aa, synthetic construct
  REGION 1..21: note = Synthetic
STLRDLLERLKTIMKEKYSKC

SEQ ID NO: 1538 - protein, 34 aa, synthetic construct
  REGION 1..34: note = Synthetic
RGILDTLKHLAKTAGKGALQSLLNHASCKLSGQC

SEQ ID NO: 1539 - protein, 23 aa, synthetic construct
  REGION 1..23: note = Synthetic
STLENFLERLKTIMREKYSKCSS

SEQ ID NO: 1540 - protein, 23 aa, synthetic construct
  REGION 1..23: note = Synthetic
STLENFLERLKTIMREKYSKCSS

SEQ ID NO: 1541 - protein, 21 aa, synthetic construct
  REGION 1..21: note = Synthetic
STLKDFLERLKTIMKEKYSKC

SEQ ID NO: 1542 - protein, 21 aa, synthetic construct
  REGION 1..21: note = Synthetic
STLKDFLERLKTIMKEKYSKC

SEQ ID NO: 1543 - protein, 22 aa, synthetic construct
  REGION 1..22: note = Synthetic
STLKDFLERLKTIMKEKYSKCQ

SEQ ID NO: 1544 - protein, 22 aa, synthetic construct
  REGION 1..22: note = Synthetic
STLKDFLERLKTIMKEKYSKCS

SEQ ID NO: 1545 - protein, 22 aa, synthetic construct
  REGION 1..22: note = Synthetic
STLKDFLERLKTIMKEKYSKCS

SEQ ID NO: 1546 - protein, 15 aa, synthetic construct
  REGION 1..15: note = Synthetic
QLHSLCRSVFSSISN

SEQ ID NO: 1547 - protein, 11 aa, synthetic construct
  REGION 1..11: note = Synthetic
INAVSAIAKHF

SEQ ID NO: 1548 - protein, 22 aa, synthetic construct
  REGION 1..22: note = Synthetic
FKKVLHFIQKGISKLKSCKEGN

SEQ ID NO: 1549 - protein, 36 aa, synthetic construct
  REGION 1..36: note = Synthetic
LFTLIKGAAKLIGKTVAKEAGKTGLELMACKITNQC

SEQ ID NO: 1550 - protein, 14 aa, synthetic construct
  REGION 1..14: note = Synthetic
ALERCMSLWRDCAH

SEQ ID NO: 1551 - protein, 22 aa, synthetic construct
  REGION 1..22: note = Synthetic
FKKVLHFIQKGISKLKSCKEGN

SEQ ID NO: 1552 - protein, 12 aa, synthetic construct
  REGION 1..12: note = Synthetic
AIAGLVGGLINR

SEQ ID NO: 1553 - protein, 13 aa, synthetic construct
  REGION 1..13: note = Synthetic
KWVREYINSLEMS

SEQ ID NO: 1554 - protein, 20 aa, synthetic construct
  REGION 1..20: note = Synthetic
RLWRYFTRFLHKQPYYYVHI

SEQ ID NO: 1555 - protein, 36 aa, synthetic construct
  REGION 1..36: note = Synthetic
RGMWSTIRNVGKSAAKAANLPAKAALGAISEAVGEQ

SEQ ID NO: 1556 - protein, 13 aa, synthetic construct
  REGION 1..13: note = Synthetic
KTYTELFKEYFGK

SEQ ID NO: 1557 - protein, 22 aa, synthetic construct
  REGION 1..22: note = Synthetic
CKRCCSYAGEAIDKVTEAQPHN

SEQ ID NO: 1558 - protein, 22 aa, synthetic construct
  REGION 1..22: note = Synthetic
CKRCCSYAGEAIDKVTEAQPHN

SEQ ID NO: 1559 - protein, 16 aa, synthetic construct
  REGION 1..16: note = Synthetic
LNKWITFCQRIFSTLT

SEQ ID NO: 1560 - protein, 18 aa, synthetic construct
  REGION 1..18: note = Synthetic
NFLSLIKKIFSVWKREVI

SEQ ID NO: 1561 - protein, 19 aa, synthetic construct
  REGION 1..19: note = Synthetic
LKDFLENLKTILKKKYSEC

SEQ ID NO: 1562 - protein, 33 aa, synthetic construct
  REGION 1..33: note = Synthetic
TEVMEKFHRALETLPVPIQISLNFTQGKERCRV

SEQ ID NO: 1563 - protein, 37 aa, synthetic construct
  REGION 1..37: note = Synthetic
QVISRVYQTATHLPRVCNIRQVSICPFQKTMPGPGFY

SEQ ID NO: 1564 - protein, 38 aa, synthetic construct
  REGION 1..38: note = Synthetic
RGLFSILKGVGKIALKGLAKNMGKMGLDLVSCKISKEC

SEQ ID NO: 1565 - protein, 13 aa, synthetic construct
  REGION 1..13: note = Synthetic
KWVREYINSLEMS

SEQ ID NO: 1566 - protein, 13 aa, synthetic construct
  REGION 1..13: note = Synthetic
KWVREYINSLEMS

SEQ ID NO: 1567 - protein, 13 aa, synthetic construct
  REGION 1..13: note = Synthetic
YSRGCSTITRCRR

SEQ ID NO: 1568 - protein, 37 aa, synthetic construct
  REGION 1..37: note = Synthetic
RKAISELIKVMNDLSPKSNLRKRKRSQNLFRGRRASK

SEQ ID NO: 1569 - protein, 24 aa, synthetic construct
  REGION 1..24: note = Synthetic
IKGLGKNLGKMGLDLVSCKISKEC

SEQ ID NO: 1570 - protein, 36 aa, synthetic construct
  REGION 1..36: note = Synthetic
ILSLVKGAAKLLGKGLAKEGGKVGLEFIACKVTNQC

SEQ ID NO: 1571 - protein, 23 aa, synthetic construct
  REGION 1..23: note = Synthetic
STLEDFLERLKTIMREKYSKCSS

SEQ ID NO: 1572 - protein, 23 aa, synthetic construct
  REGION 1..23: note = Synthetic
STLEDFLERLKTIMREKYSKCSS

SEQ ID NO: 1573 - protein, 23 aa, synthetic construct
  REGION 1..23: note = Synthetic
STLEDFLERLKTIMREKYSKCSS

SEQ ID NO: 1574 - protein, 23 aa, synthetic construct
  REGION 1..23: note = Synthetic
STLEDFLERLKTIMREKYSKCSS

SEQ ID NO: 1575 - protein, 24 aa, synthetic construct
  REGION 1..24: note = Synthetic
KGCKKCCSYAGQAMDKVTETNSHN

SEQ ID NO: 1576 - protein, 31 aa, synthetic construct
  REGION 1..31: note = Synthetic
CYDCGKACFRRGKNLARCKKFVCRCTKSGIK

SEQ ID NO: 1577 - protein, 21 aa, synthetic construct
  REGION 1..21: note = Synthetic
DEAQKALQRLIDAVQAIIGSD

SEQ ID NO: 1578 - protein, 27 aa, synthetic construct
  REGION 1..27: note = Synthetic
ADQFANKWGRSGKDPNHFRPAGLPSKY

SEQ ID NO: 1579 - protein, 11 aa, synthetic construct
  REGION 1..11: note = Synthetic
HMRKGCSRCCS

SEQ ID NO: 1580 - protein, 15 aa, synthetic construct
  REGION 1..15: note = Synthetic
VQKIIEKILNKGSTN

SEQ ID NO: 1581 - protein, 36 aa, synthetic construct
  REGION 1..36: note = Synthetic
FFSLIKGVAKIATKGLAKNLGKMGLDLVGCKISKEC

SEQ ID NO: 1582 - protein, 13 aa, synthetic construct
  REGION 1..13: note = Synthetic
AKGIAKEFCNCPD

SEQ ID NO: 1583 - protein, 27 aa, synthetic construct
  REGION 1..27: note = Synthetic
ADQFANEWGRSGKDPNHFRPAGLPKRY

SEQ ID NO: 1584 - protein, 17 aa, synthetic construct
  REGION 1..17: note = Synthetic
DFLERLKTIMKEKYSKC

SEQ ID NO: 1585 - protein, 20 aa, synthetic construct
  REGION 1..20: note = Synthetic
RKAMENIVYMIHSFFLPFAS

SEQ ID NO: 1586 - protein, 11 aa, synthetic construct
  REGION 1..11: note = Synthetic
HVRKGCSRCCS

SEQ ID NO: 1587 - protein, 21 aa, synthetic construct
  REGION 1..21: note = Synthetic
STLKDFLERLKTIMKEKYSKC

SEQ ID NO: 1588 - protein, 21 aa, synthetic construct
  REGION 1..21: note = Synthetic
STLKDFLERLKTIMKEKYSKC

SEQ ID NO: 1589 - protein, 16 aa, synthetic construct
  REGION 1..16: note = Synthetic
FADLFGKAVDFIKSRV

SEQ ID NO: 1590 - protein, 24 aa, synthetic construct
  REGION 1..24: note = Synthetic
LVSSIGKALGGLLADVVKTKEQPA

SEQ ID NO: 1591 - protein, 31 aa, synthetic construct
  REGION 1..31: note = Synthetic
FLDIINKLGKTFAGHMLDKIKCTIGTCPPSP

SEQ ID NO: 1592 - protein, 23 aa, synthetic construct
  REGION 1..23: note = Synthetic
STLENFLERLKTIMREKYSKCSS

SEQ ID NO: 1593 - protein, 28 aa, synthetic construct
  REGION 1..28: note = Synthetic
KDWVKIAGGWLKKKGPGILKAAMAAATQ

SEQ ID NO: 1594 - protein, 15 aa, synthetic construct
  REGION 1..15: note = Synthetic
VQKVLQRMLKGSKAT

SEQ ID NO: 1595 - protein, 27 aa, synthetic construct
  REGION 1..27: note = Synthetic
KDWMKTAGEWLKKKGPGILKAAMAAAT

SEQ ID NO: 1596 - protein, 25 aa, synthetic construct
  REGION 1..25: note = Synthetic
SILRGLEKLAKMGIALTNCKATKKC

SEQ ID NO: 1597 - protein, 25 aa, synthetic construct
  REGION 1..25: note = Synthetic
SILRGLEKLAKMGIALTNCKATKKC

SEQ ID NO: 1598 - protein, 31 aa, synthetic construct
  REGION 1..31: note = Synthetic
DEWAEKLRSWLRSWQERNVTVYNSICNRRGK

SEQ ID NO: 1599 - protein, 15 aa, synthetic construct
  REGION 1..15: note = Synthetic
CKTACSDLCQDVDDA

SEQ ID NO: 1600 - protein, 27 aa, synthetic construct
  REGION 1..27: note = Synthetic
KLFRVYSNFLRGKLKLYTGEACRRGDR

SEQ ID NO: 1601 - protein, 27 aa, synthetic construct
  REGION 1..27: note = Synthetic
LTTLKDFLESLKSILRGKYLQSCTSMS

SEQ ID NO: 1602 - protein, 27 aa, synthetic construct
  REGION 1..27: note = Synthetic
LTTLKDFLESLKSILRGKYLQSCTSMS

SEQ ID NO: 1603 - protein, 11 aa, synthetic construct
  REGION 1..11: note = Synthetic
INAVSALAKHF

SEQ ID NO: 1604 - protein, 25 aa, synthetic construct
  REGION 1..25: note = Synthetic
FKKAGTDLLNFLSSFIDPKKQPATR

SEQ ID NO: 1605 - protein, 14 aa, synthetic construct
  REGION 1..14: note = Synthetic
YSRGCSAITRCRRS

SEQ ID NO: 1606 - protein, 22 aa, synthetic construct
  REGION 1..22: note = Synthetic
NAILNGLGKGMNFIENTFSFCV

SEQ ID NO: 1607 - protein, 28 aa, synthetic construct
  REGION 1..28: note = Synthetic
EWIQRMMEVLRKRSSSTLPVPVFKRKIP

SEQ ID NO: 1608 - protein, 12 aa, synthetic construct
  REGION 1..12: note = Synthetic
AIAGLVHGLINR

SEQ ID NO: 1609 - protein, 21 aa, synthetic construct
  REGION 1..21: note = Synthetic
STLRDLLERLKTIMKEKYSKC

SEQ ID NO: 1610 - protein, 33 aa, synthetic construct
  REGION 1..33: note = Synthetic
FKELERAGQRVRDAIISAGPAVATVAQATALAK

SEQ ID NO: 1611 - protein, 17 aa, synthetic construct
  REGION 1..17: note = Synthetic
DLLERLKTIMKEKYSKC

SEQ ID NO: 1612 - protein, 21 aa, synthetic construct
  REGION 1..21: note = Synthetic
STLRDLLERLKTIMKEKYSKC

SEQ ID NO: 1613 - protein, 12 aa, synthetic construct
  REGION 1..12: note = Synthetic
KCINRMCKCYGC

SEQ ID NO: 1614 - protein, 34 aa, synthetic construct
  REGION 1..34: note = Synthetic
FKELERAGQRVRDAVISAAPAVATVGQAAAIARG

SEQ ID NO: 1615 - protein, 34 aa, synthetic construct
  REGION 1..34: note = Synthetic
FKELERAGQRVRDAVISAAAVATVGQAAAIARGG

SEQ ID NO: 1616 - protein, 20 aa, synthetic construct
  REGION 1..20: note = Synthetic
MLKDFLERLKTIMKEKYSKC

SEQ ID NO: 1617 - protein, 29 aa, synthetic construct
  REGION 1..29: note = Synthetic
LWKSLLKGAGQLVGGVVQHFMGSQGQPES

SEQ ID NO: 1618 - protein, 19 aa, synthetic construct
  REGION 1..19: note = Synthetic
EKAAGKAKKFGGKIKKWFG

SEQ ID NO: 1619 - protein, 19 aa, synthetic construct
  REGION 1..19: note = Synthetic
EKAAGKAKKFGGKIKKWFG

SEQ ID NO: 1620 - protein, 31 aa, synthetic construct
  REGION 1..31: note = Synthetic
CYDCGKACFRRGKNLARCQKFVCRCTISKLR

SEQ ID NO: 1621 - protein, 26 aa, synthetic construct
  REGION 1..26: note = Synthetic
IPAYYKRCARLLTRLAVSPVCMEDKQ

SEQ ID NO: 1622 - protein, 33 aa, synthetic construct
  REGION 1..33: note = Synthetic
QIADLFDSGLSDADDLFDSGLSDADAKFMKMFM

SEQ ID NO: 1623 - protein, 11 aa, synthetic construct
  REGION 1..11: note = Synthetic
SAITHCYRYAR

SEQ ID NO: 1624 - protein, 25 aa, synthetic construct
  REGION 1..25: note = Synthetic
VKKAGTDLINFLNNFMDLKAQPATQ

SEQ ID NO: 1625 - protein, 23 aa, synthetic construct
  REGION 1..23: note = Synthetic
VLSNVIGYLKKLGTGALNAVLKQ

SEQ ID NO: 1626 - protein, 24 aa, synthetic construct
  REGION 1..24: note = Synthetic
LVASIGRALGGLLADVVKSKEQPA

SEQ ID NO: 1627 - protein, 12 aa, synthetic construct
  REGION 1..12: note = Synthetic
KCINRVCKCYGC

SEQ ID NO: 1628 - protein, 34 aa, synthetic construct
  REGION 1..34: note = Synthetic
FGKRGLRNLDNLDDDIFEPEMSEADLRYLQDLLR

SEQ ID NO: 1629 - protein, 32 aa, synthetic construct
  REGION 1..32: note = Synthetic
LLDKLKNFAKTAGKGVLQSLLNTASCKLSGQC

SEQ ID NO: 1630 - protein, 32 aa, synthetic construct; identical to SEQ ID NO: 1629
  REGION 1..32: note = Synthetic

SEQ ID NO: 1631 - protein, 32 aa, synthetic construct; identical to SEQ ID NO: 1629
  REGION 1..32: note = Synthetic

SEQ ID NO: 1632 - protein, 19 aa, synthetic construct
  REGION 1..19: note = Synthetic
LKDFLERLKTIMKEKYSKC

SEQ ID NO: 1633 - protein, 23 aa, synthetic construct
  REGION 1..23: note = Synthetic
KAARKAAKAAKKAAKAAKASAAA

SEQ ID NO: 1634 - protein, 32 aa, synthetic construct
  REGION 1..32: note = Synthetic
GILSSIKGVAKGVAKNVAAQLLDTLKCKITGC

SEQ ID NO: 1635 - protein, 22 aa, synthetic construct
  REGION 1..22: note = Synthetic
NAILNGLGKGMNFIENTFSFCV

SEQ ID NO: 1636 - protein, 22 aa, synthetic construct
  REGION 1..22: note = Synthetic
NAILNGLGKGMNFIENTFSFCV

SEQ ID NO: 1637 - protein, 37 aa, synthetic construct
  REGION 1..37: note = Synthetic
RKAVSELKKVMNDLLPHSTLRKRKRSQSSIRGRRASK

SEQ ID NO: 1638 - protein, 22 aa, synthetic construct
  REGION 1..22: note = Synthetic
NAILNRLGKGMNFIENTFSFCV

SEQ ID NO: 1639 - protein, 21 aa, synthetic construct
  REGION 1..21: note = Synthetic
STLKDLLEGLKTIMKEKYSKC

SEQ ID NO: 1640 - protein, 14 aa, synthetic construct
  REGION 1..14: note = Synthetic
DKLKEFGNTLEDKA

SEQ ID NO: 1641 - protein, 13 aa, synthetic construct
  REGION 1..13: note = Synthetic
KIVQKMLKSGIRK

SEQ ID NO: 1642 - protein, 11 aa, synthetic construct
  REGION 1..11: note = Synthetic
NAVSAIAKHFG

SEQ ID NO: 1643 - protein, 11 aa, synthetic construct
  REGION 1..11: note = Synthetic
NAVSAIAKHFG

SEQ ID NO: 1644 - protein, 11 aa, synthetic construct
  REGION 1..11: note = Synthetic
NAVSAIAKHFG

SEQ ID NO: 1645 - protein, 19 aa, synthetic construct
  REGION 1..19: note = Synthetic
SDFVQGMKKAAEDMKNKVI

SEQ ID NO: 1646 - protein, 34 aa, synthetic construct
  REGION 1..34: note = Synthetic
SFLEQADRLMKNLQEINLVDRNSKLSLRLKRLTK

SEQ ID NO: 1647 - protein, 31 aa, synthetic construct
  REGION 1..31: note = Synthetic
DALSKLFRIYSNFLRGKLTLYTGEACRRGDR

SEQ ID NO: 1648 - protein, 31 aa, synthetic construct; identical to SEQ ID NO: 1647
  REGION 1..31: note = Synthetic

SEQ ID NO: 1649 - protein, 31 aa, synthetic construct; identical to SEQ ID NO: 1647
  REGION 1..31: note = Synthetic

SEQ ID NO: 1650 - protein, 23 aa, synthetic construct
  REGION 1..23: note = Synthetic
STLENFLERLKTIMREKYSKCSS

SEQ ID NO: 1651 - protein, 23 aa, synthetic construct
  REGION 1..23: note = Synthetic
STLENFLERLKTIMREKYSKCSS

SEQ ID NO: 1652 - protein, 23 aa, synthetic construct
  REGION 1..23: note = Synthetic
STLENFLERLKTIMREKYSKCSS

SEQ ID NO: 1653 - protein, 23 aa, synthetic construct
  REGION 1..23: note = Synthetic
STLENFLERLKTIMREKYSKCSS

SEQ ID NO: 1654 - protein, 23 aa, synthetic construct
  REGION 1..23: note = Synthetic
STLENFLERLKTIMREKYSKCSS

SEQ ID NO: 1655 - protein, 23 aa, synthetic construct
  REGION 1..23: note = Synthetic
STLENFLERLKTIMREKYSKCSS

SEQ ID NO: 1656 - protein, 25 aa, synthetic construct
  REGION 1..25: note = Synthetic
SILKGLEKLAKMGIALTNCKATKKC

SEQ ID NO: 1657 - protein, 23 aa, synthetic construct
  REGION 1..23: note = Synthetic
STLEDFLERLKTIMREKYSKCSS

SEQ ID NO: 1658 - protein, 23 aa, synthetic construct
  REGION 1..23: note = Synthetic
STLEDFLERLKTIMREKYSKCSS

SEQ ID NO: 1659 - protein, 29 aa, synthetic construct
  REGION 1..29: note = Synthetic
KAKSALKDVLKKAKDKVKEKVAQHFLKQL

SEQ ID NO: 1660 - protein, 34 aa, synthetic construct
  REGION 1..34: note = Synthetic
VRKIYQTAKHLPNVCDIPQVDVCPFNIPSFPSFY

SEQ ID NO: 1661 - protein, 17 aa, synthetic construct
  REGION 1..17: note = Synthetic
TTFIEKLTTFIRKASKT

SEQ ID NO: 1662 - protein, 22 aa, synthetic construct
  REGION 1..22: note = Synthetic
KWVQDAMKYLDENSRTTKYSSF

SEQ ID NO: 1663 - protein, 29 aa, synthetic construct
  REGION 1..29: note = Synthetic
RGIMDTVKGVAKTVAASLLDKLKCKITGC

SEQ ID NO: 1664 - protein, 12 aa, synthetic construct
  REGION 1..12: note = Synthetic
DLASGIVEAIKS

SEQ ID NO: 1665 - protein, 16 aa, synthetic construct
  REGION 1..16: note = Synthetic
YRRGCSVITHCYRQTS

SEQ ID NO: 1666 - protein, 42 aa, synthetic construct
  REGION 1..42: note = Synthetic
CFKKFPKGITRLPWVIRGCAATCPKAEARVYVDCCARDKCNR

SEQ ID NO: 1667 - protein, 35 aa, synthetic construct
  REGION 1..35: note = Synthetic
NLLKMLSKAVDALKSDKKVRTIIIRSEVPGIFCAE

SEQ ID NO: 1668 - protein, 13 aa, synthetic construct
  REGION 1..13: note = Synthetic
KWVREYINSLEMS

SEQ ID NO: 1669 - protein, 13 aa, synthetic construct
  REGION 1..13: note = Synthetic
DFAKHVIGIASKL

SEQ ID NO: 1670 - protein, 19 aa, synthetic construct
  REGION 1..19: note = Synthetic
EKAAGKAKKFGGKIKKWFG

SEQ ID NO: 1671 - protein, 25 aa, synthetic construct
  REGION 1..25: note = Synthetic
EQFQNCLSKICTDVQKTLGISESVK

SEQ ID NO: 1672 - protein, 18 aa, synthetic construct
  REGION 1..18: note = Synthetic
KGVPKFAKGLFGMLPFFK

SEQ ID NO: 1673 - protein, 15 aa, synthetic construct
  REGION 1..15: note = Synthetic
DMWEDVYELMQNWQR

SEQ ID NO: 1674 - protein, 22 aa, synthetic construct
  REGION 1..22: note = Synthetic
EVAHFITKLLSYTKQLFRHGPF

SEQ ID NO: 1675 - protein, 21 aa, synthetic construct
  REGION 1..21: note = Synthetic
ATRFMEKLMTFVRKASKKTRL

SEQ ID NO: 1676 - protein, 11 aa, synthetic construct
  REGION 1..11: note = Synthetic
INAVSAIAKHF

SEQ ID NO: 1677 - protein, 20 aa, synthetic construct
  REGION 1..20: note = Synthetic
YNRGCSVITRCARDTNDIKT

SEQ ID NO: 1678 - protein, 13 aa, synthetic construct
  REGION 1..13: note = Synthetic
GRDVSQWIRGCRV

SEQ ID NO: 1679 - protein, 19 aa, synthetic construct
  REGION 1..19: note = Synthetic
SIVRHFVTEVRDMFFYFIL

SEQ ID NO: 1680 - protein, 28 aa, synthetic construct
  REGION 1..28: note = Synthetic
LWSKIKEAGKAAVKAAGKAALGAVADSV

SEQ ID NO: 1681 - protein, 16 aa, synthetic construct
  REGION 1..16: note = Synthetic
RLQKIIQKLLKSDKSS

SEQ ID NO: 1682 - protein, 19 aa, synthetic construct
  REGION 1..19: note = Synthetic
EKAAGKAKKFGGKIRKWFG

SEQ ID NO: 1683 - protein, 18 aa, synthetic construct
  REGION 1..18: note = Synthetic
FAGLLASILKPIIDAAKG

SEQ ID NO: 1684 - protein, 27 aa, synthetic construct
  REGION 1..27: note = Synthetic
KLFRIYSNFLRGKLKLYTGEACRRGDR

SEQ ID NO: 1685 - protein, 19 aa, synthetic construct
  REGION 1..19: note = Synthetic
EKAADKAKKFGGKIKKWFG

SEQ ID NO: 1686 - protein, 29 aa, synthetic construct
  REGION 1..29: note = Synthetic
FLDTLKGAAKDVAGKLEGLKCKITGCKLP

SEQ ID NO: 1687 - protein, 19 aa, synthetic construct
  REGION 1..19: note = Synthetic
EKAAGKAKKFGGKIKKWFG

SEQ ID NO: 1688 - protein, 19 aa, synthetic construct
  REGION 1..19: note = Synthetic
EKAAGKAKKFGGKIKKWFG

SEQ ID NO: 1689 - protein, 19 aa, synthetic construct
  REGION 1..19: note = Synthetic
EKAAGKAKKFGGKIKKWFG

SEQ ID NO: 1690 - protein, 19 aa, synthetic construct
  REGION 1..19: note = Synthetic
EKAAGKAKKFGGKIKKWFG

SEQ ID NO: 1691 - protein, 19 aa, synthetic construct
  REGION 1..19: note = Synthetic
EKAAGKAKKFGGKIKKWFG

SEQ ID NO: 1692 - protein, 19 aa, synthetic construct
  REGION 1..19: note = Synthetic
EKAAGKAKKFGGKIKKWFG

SEQ ID NO: 1693 - protein, 19 aa, synthetic construct
  REGION 1..19: note = Synthetic
EKAAGKAKKFGGKIKKWFG

SEQ ID NO: 1694 - protein, 35 aa, synthetic construct
  REGION 1..35: note = Synthetic
MWSKIKNAGKAAAKASKKAAGKAALGAVSEALGEQ

SEQ ID NO: 1695 - protein, 16 aa, synthetic construct
  REGION 1..16: note = Synthetic
LKKVIQKILDGGNKEN

SEQ ID NO: 1696 - protein, 19 aa, synthetic construct
  REGION 1..19: note = Synthetic
SELIKELEDILEEIKMLKP

SEQ ID NO: 1697 - protein, 20 aa, synthetic construct
  REGION 1..20: note = Synthetic
RHITRLVSNCLDLATAIRQP

SEQ ID NO: 1698 - protein, 13 aa, synthetic construct
  REGION 1..13: note = Synthetic
DLAKHVIGIASKL

SEQ ID NO: 1699 - protein, 22 aa, synthetic construct
  REGION 1..22: note = Synthetic
LWQKIKNAAGDLASGIVEGIKS

SEQ ID NO: 1700 - protein, 13 aa, synthetic construct
  REGION 1..13: note = Synthetic
IVSGAVSLAKKLG

SEQ ID NO: 1701 - protein, 11 aa, synthetic construct
  REGION 1..11: note = Synthetic
NAVSALAKHFG

SEQ ID NO: 1702 - protein, 11 aa, synthetic construct
  REGION 1..11: note = Synthetic
NAVSALAKHFG

SEQ ID NO: 1703 - protein, 23 aa, synthetic construct
  REGION 1..23: note = Synthetic
EVIQLVKNLLTYARSVFRHGNFP

SEQ ID NO: 1704 - protein, 33 aa, synthetic construct
  REGION 1..33: note = Synthetic
FGKRGLSDLDDLDESFDGEVSQADIDFLKELMQ

SEQ ID NO: 1705 - protein, 17 aa, synthetic construct
  REGION 1..17: note = Synthetic
KFLQIFTDFLDNLSETL

SEQ ID NO: 1706 - protein, 16 aa, synthetic construct
  REGION 1..16: note = Synthetic
KCCGGCPRLCEKPCYD

SEQ ID NO: 1707 - protein, 12 aa, synthetic construct
  REGION 1..12: note = Synthetic
DLASGIVEGIKS

SEQ ID NO: 1708 - protein, 36 aa, synthetic construct
  REGION 1..36: note = Synthetic
IFSLVKGVAKLAGKTLAKEGGKFGLELAMCKIAKQC

SEQ ID NO: 1709 - protein, 36 aa, synthetic construct
  REGION 1..36: note = Synthetic
IFSLIKGAAQLIGKTVAKEAGKTGLELMACKVTKQC

SEQ ID NO: 1710 - protein, 19 aa, synthetic construct
  REGION 1..19: note = Synthetic
QECVQQLESLLQKAISRLA

SEQ ID NO: 1711 - protein, 28 aa, synthetic construct
  REGION 1..28: note = Synthetic
DCYRRFEQGVAKGIQCWCIGKDVTYKGV

SEQ ID NO: 1712 - protein, 35 aa, synthetic construct
  REGION 1..35: note = Synthetic
KVQKCVYQCFEKIDKRVRTKYMTTINVNKLIVDYD

SEQ ID NO: 1713 - protein, 25 aa, synthetic construct
  REGION 1..25: note = Synthetic
NWRKILGQIASVGAGLLGSLLAGYE

SEQ ID NO: 1714 - protein, 12 aa, synthetic construct
  REGION 1..12: note = Synthetic
LFDIIKNIFSGL

SEQ ID NO: 1715 - protein, 28 aa, synthetic construct
  REGION 1..28: note = Synthetic
SQCWTPCKKAIGSLQSKCMNGKCKCYNG

SEQ ID NO: 1716 - protein, 41 aa, synthetic construct
  REGION 1..41: note = Synthetic
LHWVQKLMKNIEARRKKVSPGVRAMSTKALVQRYPANSTSI

SEQ ID NO: 1717 - protein, 20 aa, synthetic construct
  REGION 1..20: note = Synthetic
FRFFYNILKSINTLFTASKN

SEQ ID NO: 1718 - protein, 15 aa, synthetic construct
  REGION 1..15: note = Synthetic
VQKIIQKILNKGKAN

SEQ ID NO: 1719 - protein, 40 aa, synthetic construct
  REGION 1..40: note = Synthetic
YIKAAWKIGRHALGDMTDEEFQDFMKEVEQAREEELQSRQ

SEQ ID NO: 1720 - protein, 33 aa, synthetic construct
  REGION 1..33: note = Synthetic
FSSLFKAGAKYLLKSVGKAGAQQLACKAANNCA

SEQ ID NO: 1721 - protein, 24 aa, synthetic construct
  REGION 1..24: note = Synthetic
LDRICEDCYNLFREPQLHMLCKYV

SEQ ID NO: 1722 - protein, 31 aa, synthetic construct
  REGION 1..31: note = Synthetic
DKLKEFGNTLEDKAREVINRIKQSELSAKTR

SEQ ID NO: 1723 - protein, 15 aa, synthetic construct
  REGION 1..15: note = Synthetic
YCRFGNTIYRLCCRR

SEQ ID NO: 1724 - protein, 27 aa, synthetic construct
  REGION 1..27: note = Synthetic
KLFRVYSNFLRGKLKLYTGEACRRGDR

SEQ ID NO: 1725 - protein, 27 aa, synthetic construct
  REGION 1..27: note = Synthetic
IMDSVKGLAKNLAGKLLDSLKCKITGC

SEQ ID NO: 1726 - protein, 19 aa, synthetic construct
  REGION 1..19: note = Synthetic
WMSKIASGIGTFLSGMQQG

SEQ ID NO: 1727 - protein, 21 aa, synthetic construct
  REGION 1..21: note = Synthetic
STLKDFLERLKTIMKEKYSKC

SEQ ID NO: 1728 - protein, 24 aa, synthetic construct
  REGION 1..24: note = Synthetic
VVDILKGAAKDLAGHLASKVMNKI

SEQ ID NO: 1729 - protein, 19 aa, synthetic construct
  REGION 1..19: note = Synthetic
REFVQQLESLLQKVAGYYE

SEQ ID NO: 1730 - protein, 17 aa, synthetic construct
  REGION 1..17: note = Synthetic
KELNQMANNCMTLANMI

SEQ ID NO: 1731 - protein, 29 aa, synthetic construct
  REGION 1..29: note = Synthetic
LTTILESFWEWFNESDDYKNPCCCSSCPF

SEQ ID NO: 1732 - protein, 31 aa, synthetic construct
  REGION 1..31: note = Synthetic
CEKITRCARDAARYTESFNVDDDESPIINLH

SEQ ID NO: 1733 - protein, 35 aa, synthetic construct
  REGION 1..35: note = Synthetic
GLFRFARGYVEARTKWINLKNGDATVEYSCYVLHY

SEQ ID NO: 1734 - protein, 22 aa, synthetic construct
  REGION 1..22: note = Synthetic
RQLRSFMQDVFRSLRCISVSQC

SEQ ID NO: 1735 - protein, 22 aa, synthetic construct
  REGION 1..22: note = Synthetic
RQFLDYLQEFLGVMSTEWTMEG

SEQ ID NO: 1736 - protein, 17 aa, synthetic construct
  REGION 1..17: note = Synthetic
KELNQMANNCMTLANMI

SEQ ID NO: 1737 - protein, 27 aa, synthetic construct
  REGION 1..27: note = Synthetic
KLFRIYSNFLRGKLKLYTGEACRRGDR

SEQ ID NO: 1738 - protein, 27 aa, synthetic construct
  REGION 1..27: note = Synthetic
KLFRIYSNFLRGKLKLYTGEACRRGDR

SEQ ID NO: 1739 - protein, 27 aa, synthetic construct
  REGION 1..27: note = Synthetic
KLFRIYSNFLRGKLKLYTGEACRRGDR

SEQ ID NO: 1740 - protein, 15 aa, synthetic construct
  REGION 1..15: note = Synthetic
SLFGALSNIGRNRNQ

SEQ ID NO: 1741 - protein, 21 aa, synthetic construct
  REGION 1..21: note = Synthetic
LEDFLDRLKTAMQEKYSKRQS

SEQ ID NO: 1742 - protein, 33 aa, synthetic construct
  REGION 1..33: note = Synthetic
GLFDVVKGVLKGAGKNVAGSLLEQLKCKLSGGC

SEQ ID NO: 1743 - protein, 19 aa, synthetic construct
  REGION 1..19: note = Synthetic
LVEQMVEKIRSIWNGKLGY

SEQ ID NO: 1744 - protein, 17 aa, synthetic construct
  REGION 1..17: note = Synthetic
FNNIFNSIYSFFKNAVQ

SEQ ID NO: 1745 - protein, 25 aa, synthetic construct
  REGION 1..25: note = Synthetic
NCLSTMRSMMTNLTKTMDNIIIIAL

SEQ ID NO: 1746 - protein, 18 aa, synthetic construct
  REGION 1..18: note = Synthetic
VKQVLNQLLKNMDHLKTC

SEQ ID NO: 1747 - protein, 20 aa, synthetic construct
  REGION 1..20: note = Synthetic
ILSAGKSIIKGLANGLAEHF

SEQ ID NO: 1748 - protein, 21 aa, synthetic construct
  REGION 1..21: note = Synthetic
LEDFLDRLKTAMQEKYSKRQS

SEQ ID NO: 1749 - protein, 21 aa, synthetic construct
  REGION 1..21: note = Synthetic
LEDFLDRLKTAMQEKYSKRQS

SEQ ID NO: 1750 - protein, 21 aa, synthetic construct
  REGION 1..21: note = Synthetic
LEDFLDRLKTAMQEKYSKRQS

SEQ ID NO: 1751 - protein, 15 aa, synthetic construct
  REGION 1..15: note = Synthetic
IKTLASNALSLISDL

SEQ ID NO: 1752 - protein, 19 aa, synthetic construct
  REGION 1..19: note = Synthetic
LGGLMKAFPAIICAVTKKC

SEQ ID NO: 1753 - protein, 12 aa, synthetic construct
  REGION 1..12: note = Synthetic
KRCHNYAKKCVT

SEQ ID NO: 1754 - protein, 15 aa, synthetic construct
  REGION 1..15: note = Synthetic
FFKKLWRGVKKVVKK

SEQ ID NO: 1755 - protein, 22 aa, synthetic construct
  REGION 1..22: note = Synthetic
AYYKRCARLLTRLAVSPLCSQT

SEQ ID NO: 1756 - protein, 17 aa, synthetic construct
  REGION 1..17: note = Synthetic
FLNRWITFCQSIISTLT

SEQ ID NO: 1757 - protein, 17 aa, synthetic construct
  REGION 1..17: note = Synthetic
FLNRWITFCQSIISTLT

SEQ ID NO: 1758 - protein, 17 aa, synthetic construct
  REGION 1..17: note = Synthetic
FLNRWITFCQSIISTLT

SEQ ID NO: 1759 - protein, 17 aa, synthetic construct
  REGION 1..17: note = Synthetic
FLNRWITFCQSIISTLT

SEQ ID NO: 1760 - protein, 17 aa, synthetic construct
  REGION 1..17: note = Synthetic
FLNRWITFCQSIISTLT

SEQ ID NO: 1761 - protein, 17 aa, synthetic construct
  REGION 1..17: note = Synthetic
FLNRWITFCQSIISTLT

SEQ ID NO: 1762 - protein, 17 aa, synthetic construct
  REGION 1..17: note = Synthetic
FLNRWITFCQSIISTLT

SEQ ID NO: 1763 - protein, 17 aa, synthetic construct
  REGION 1..17: note = Synthetic
FLNRWITFCQSIISTLT

SEQ ID NO: 1764 - protein, 17 aa, synthetic construct
  REGION 1..17: note = Synthetic
FLNRWITFCQSIISTLT

SEQ ID NO: 1765 - protein, 17 aa, synthetic construct
  REGION 1..17: note = Synthetic
FLNRWITFCQSIISTLT

SEQ ID NO: 1766 - protein, 17 aa, synthetic construct
  REGION 1..17: note = Synthetic
FLNRWITFCQSIISTLT

SEQ ID NO: 1767 - protein, 17 aa, synthetic construct
  REGION 1..17: note = Synthetic
FLNRWITFCQSIISTLT

SEQ ID NO: 1768 - protein, 17 aa, synthetic construct
  REGION 1..17: note = Synthetic
FLNRWITFCQSIISTLT

SEQ ID NO: 1769 - protein, 28 aa, synthetic construct
  REGION 1..28: note = Synthetic
NCYRRFEQGVAKGIQCWCIEKDVTYKGV

SEQ ID NO: 1770 - protein, 22 aa, synthetic construct
  REGION 1..22: note = Synthetic
NAILNGLGKGMNFIENTFSFCV

SEQ ID NO: 1771 - protein, 22 aa, synthetic construct
  REGION 1..22: note = Synthetic
NAILNGLGKGMNFIENTFSFCV

SEQ ID NO: 1772 - protein, 17 aa, synthetic construct
  REGION 1..17: note = Synthetic
FLNKWITFCQSIFSTLT

SEQ ID NO: 1773 - protein, 17 aa, synthetic construct
  REGION 1..17: note = Synthetic
QVKKVVQKALKRVEKQN

SEQ ID NO: 1774 - protein, 41 aa, synthetic construct
  REGION 1..41: note = Synthetic
LKQILHSWGEECRACAEKTDYVNLIQELAPKYAATHPKTEL

SEQ ID NO: 1775 - protein, 34 aa, synthetic construct
  REGION 1..34: note = Synthetic
RLYSFLQNCFTNIKYKYKEYTNINLCRLSIYISK

SEQ ID NO: 1776 - protein, 27 aa, synthetic construct
  REGION 1..27: note = Synthetic
TDCTTCIQDAAKKIREVCPNQSDARIL

SEQ ID NO: 1777 - protein, 28 aa, synthetic construct
  REGION 1..28: note = Synthetic
VRGMASKAGAIAGKIAKVALKALGRRDS

SEQ ID NO: 1778 - protein, 28 aa, synthetic construct
  REGION 1..28: note = Synthetic
VRGMASKAGAIAGKIAKVALKALGRRDS

SEQ ID NO: 1779 - protein, 41 aa, synthetic construct
  REGION 1..41: note = Synthetic
LKSVANTIPGINDDFAKQLPAKCGVNIGVPFSKTVDCNSIN

SEQ ID NO: 1780 - protein, 12 aa, synthetic construct
  REGION 1..12: note = Synthetic
HCIKSIGRCVAH

SEQ ID NO: 1781 - protein, 36 aa, synthetic construct
  REGION 1..36: note = Synthetic
ILSLVKGVAKLAGKGLAKEGGKFGLELIACKIAKQC

SEQ ID NO: 1782 - protein, 19 aa, synthetic construct
  REGION 1..19: note = Synthetic
LGGLMKAFPALICAVTKKC

SEQ ID NO: 1783 - protein, 24 aa, synthetic construct
  REGION 1..24: note = Synthetic
GRKLYNQIRRWPEWLENVDSIKNA

SEQ ID NO: 1784 - protein, 25 aa, synthetic construct
  REGION 1..25: note = Synthetic
KTIKNLLKAINKQRTKRSPRTRKEA

SEQ ID NO: 1785 - protein, 33 aa, synthetic construct
  REGION 1..33: note = Synthetic
LWKDVLKKIGTVALHAGKAAFGAAADTISQGGS

SEQ ID NO: 1786 - protein, 30 aa, synthetic construct
  REGION 1..30: note = Synthetic
LWKDVLKKIGTVALHAGKAALGAVADTISQ

SEQ ID NO: 1787 - protein, 17 aa, synthetic construct
  REGION 1..17: note = Synthetic
KELSQMANNCMTLANMI

SEQ ID NO: 1788 - protein, 16 aa, synthetic construct
  REGION 1..16: note = Synthetic
FCKRFAGGAKKCHCYC

SEQ ID NO: 1789 - protein, 29 aa, synthetic construct
  REGION 1..29: note = Synthetic
GLWETIKNFGKKFTLNILHKLKCKIGGGC

SEQ ID NO: 1790 - protein, 33 aa, synthetic construct
  REGION 1..33: note = Synthetic
SQLRNLIRSVRTVMRVPLIIVNSIAIVLLLLFG

SEQ ID NO: 1791 - protein, 25 aa, synthetic construct
  REGION 1..25: note = Synthetic
NMANKCRDCCGGGKKCFGPQCLCNR

SEQ ID NO: 1792 - protein, 14 aa, synthetic construct
  REGION 1..14: note = Synthetic
GVNAIENMLSFCFR

SEQ ID NO: 1793 - protein, 36 aa, synthetic construct
  REGION 1..36: note = Synthetic
LFSILRGAAKFASKGLGKDLTKLGVDLVACKISKQC

SEQ ID NO: 1794 - protein, 20 aa, synthetic construct
  REGION 1..20: note = Synthetic
LLGSIGNAIGAFIANKLKPK

SEQ ID NO: 1795 - protein, 23 aa, synthetic construct
  REGION 1..23: note = Synthetic
LENCGDACVNFCNGDAGLTSLTA

SEQ ID NO: 1796 - protein, 26 aa, synthetic construct
  REGION 1..26: note = Synthetic
GQCDKCCKKAGDRAGNCVYFKCKCNQ

SEQ ID NO: 1797 - protein, 13 aa, synthetic construct
  REGION 1..13: note = Synthetic
KWVREYINALELS

SEQ ID NO: 1798 - protein, 41 aa, synthetic construct
  REGION 1..41: note = Synthetic
TWARNCYNVCRLPGTISREICAKKCDCKIISGTTCPSDYPK

SEQ ID NO: 1799 - protein, 16 aa, synthetic construct
  REGION 1..16: note = Synthetic
KWVQRYIALLREQQQS

SEQ ID NO: 1800 - protein, 30 aa, synthetic construct
  REGION 1..30: note = Synthetic
KIMDPVKDLFSKMSRSRSSSYQSYRSSSNY

SEQ ID NO: 1801 - protein, 17 aa, synthetic construct
  REGION 1..17: note = Synthetic
LRRALEQFQEFLESNKK

SEQ ID NO: 1802 - protein, 21 aa, synthetic construct
  REGION 1..21: note = Synthetic
LEDFLDRLKTAMQEKYSKRQS

SEQ ID NO: 1803 - protein, 12 aa, synthetic construct
  REGION 1..12: note = Synthetic
FYGSYTGLGSSL

SEQ ID NO: 1804 - protein, 18 aa, synthetic construct
  REGION 1..18: note = Synthetic
LKWIQEYLEKALNKRLKM

SEQ ID NO: 1805 - protein, 16 aa, synthetic construct
  REGION 1..16: note = Synthetic
FGTWAKSISGLYCKCY

SEQ ID NO: 1806 - protein, 20 aa, synthetic construct
  REGION 1..20: note = Synthetic
YSRGCDTITRCARDTNDINT

SEQ ID NO: 1807 - protein, 42 aa, synthetic construct
  REGION 1..42: note = Synthetic
QVWNSVCATAIAVMAEIFAAMLVRMRGQAAARTPAAKAQKTQ

SEQ ID NO: 1808 - protein, 33 aa, synthetic construct
  REGION 1..33: note = Synthetic
MWKDVLKKIGTVALHAGKAALGAVADTISQGEQ

SEQ ID NO: 1809 - protein, 18 aa, synthetic construct
  REGION 1..18: note = Synthetic
LKWIQEYLEKALNKRFKM

SEQ ID NO: 1810 - protein, 18 aa, synthetic construct
  REGION 1..18: note = Synthetic
LKWIQEYLEKALNKRFKM

SEQ ID NO: 1811 - protein, 27 aa, synthetic construct
  REGION 1..27: note = Synthetic
QAFNELIRVVHQLLPESSLRKRKRSRC

SEQ ID NO: 1812 - protein, 16 aa, synthetic construct
  REGION 1..16: note = Synthetic
NHLENFVSTLTKLMEL

SEQ ID NO: 1813 - protein, 14 aa, synthetic construct
  REGION 1..14: note = Synthetic
DLLAHLVGKISEKV

SEQ ID NO: 1814 - protein, 19 aa, synthetic construct
  REGION 1..19: note = Synthetic
EKAAGEAKKFGGKIKKWFG

SEQ ID NO: 1815 - protein, 33 aa, synthetic construct
  REGION 1..33: note = Synthetic
IIKCINHVCQYVGNLPDFASQIPKSTKMPYKGE

SEQ ID NO: 1816 - protein, 18 aa, synthetic construct
  REGION 1..18: note = Synthetic
CSNFCSTLSDVCQESWSG

SEQ ID NO: 1817 - protein, 18 aa, synthetic construct
  REGION 1..18: note = Synthetic
YWIHMLRYVAKTFLEKWA

SEQ ID NO: 1818 - protein, 22 aa, synthetic construct
  REGION 1..22: note = Synthetic
RQFLDYLQEFLGVMSTEWAMEG

SEQ ID NO: 1819 - protein, 33 aa, synthetic construct
  REGION 1..33: note = Synthetic
GLLSAVKGVLKGAGKNVAGSLMDKLKCKLFGGC

SEQ ID NO: 1820 - protein, 16 aa, synthetic construct
  REGION 1..16: note = Synthetic
IKKIVQKIMEDGGSAA

SEQ ID NO: 1821 - protein, 12 aa, synthetic construct
  REGION 1..12: note = Synthetic
LFDIIKNIVSTL

SEQ ID NO: 1822 - protein, 22 aa, synthetic construct
  REGION 1..22: note = Synthetic
NQFLDYLQEFLGVMNTEWIIES

SEQ ID NO: 1823 - protein, 25 aa, synthetic construct
  REGION 1..25: note = Synthetic
GLFKVLGSVAKHLLPHVAPIIAEKL

SEQ ID NO: 1824 - protein, 24 aa, synthetic construct
  REGION 1..24: note = Synthetic
GLFKVLGSVAKHLLPHVAPVIAEK

SEQ ID NO: 1825 - protein, 24 aa, synthetic construct
  REGION 1..24: note = Synthetic
GLFKVLGSVAKHLLPHVAPVIAEK

SEQ ID NO: 1826 - protein, 18 aa, synthetic construct
  REGION 1..18: note = Synthetic
CSNFCSTMSDVCQENWSG

SEQ ID NO: 1827 - protein, 14 aa, synthetic construct
  REGION 1..14: note = Synthetic
HYGKKALQKVSEKL

SEQ ID NO: 1828 - protein, 27 aa, synthetic construct
  REGION 1..27: note = Synthetic
QAFNELIRVVHQLLPESSLRKRKRSRC

SEQ ID NO: 1829 - protein, 27 aa, synthetic construct
  REGION 1..27: note = Synthetic
QAFNELIRVVHQLLPESSLRKRKRSRC

SEQ ID NO: 1830 - protein, 19 aa, synthetic construct
  REGION 1..19: note = Synthetic
LPGFIGKICRKICMMQQTH

SEQ ID NO: 1831 - protein, 13 aa, synthetic construct
  REGION 1..13: note = Synthetic
ERLKKMGGNLNSP

SEQ ID NO: 1832 - protein, 27 aa, synthetic construct
  REGION 1..27: note = Synthetic
CEGAVSQCTNACSNFCTKGSAKVVETA

SEQ ID NO: 1833 - protein, 22 aa, synthetic construct
  REGION 1..22: note = Synthetic
MSAIVKVVSNIIRPLVLKNFII

SEQ ID NO: 1834 - protein, 16 aa, synthetic construct
  REGION 1..16: note = Synthetic
LQAFLAKMKEIAAQTL

SEQ ID NO: 1835 - protein, 26 aa, synthetic construct
  REGION 1..26: note = Synthetic
EKLKTFYQKLVEKAEDLKGDLKAKLS

SEQ ID NO: 1836 - protein, 19 aa, synthetic construct
  REGION 1..19: note = Synthetic
GFKDLLKGAAKALVKTVLF

SEQ ID NO: 1837 - protein, 28 aa, synthetic construct
  REGION 1..28: note = Synthetic
DCYRRFEQGVAKGIQCWCIEKDVTYKGV

SEQ ID NO: 1838 - protein, 25 aa, synthetic construct
  REGION 1..25: note = Synthetic
WLGSALKIGAKLLPSVVGLFKKKKQ

SEQ ID NO: 1839 - protein, 25 aa, synthetic construct
  REGION 1..25: note = Synthetic
WLGSALKIGAKLLPSVVGLFQKKKK

SEQ ID NO: 1840 - protein, 15 aa, synthetic construct
  REGION 1..15: note = Synthetic
VKKIIDKMLNQASSN

SEQ ID NO: 1841 - protein, 19 aa, synthetic construct
  REGION 1..19: note = Synthetic
FKTLLHNLWDLLKQSLGLP

SEQ ID NO: 1842 - protein, 20 aa, synthetic construct
  REGION 1..20: note = Synthetic
STVTKIFKSLNSFLNSNSVK

SEQ ID NO: 1843 - protein, 35 aa, synthetic construct
  REGION 1..35: note = Synthetic
GMFRFARGYVEARTKLFDMKTGDATVESNCYILHY

SEQ ID NO: 1844 - protein, 28 aa, synthetic construct
  REGION 1..28: note = Synthetic
DCYRRFEQGVAKGIQCWCIEKDVTYKGI

SEQ ID NO: 1845 - protein, 28 aa, synthetic construct
  REGION 1..28: note = Synthetic
DCYRRFEQGVAKGIQCWCIEKDVTYKGV

SEQ ID NO: 1846 - protein, 28 aa, synthetic construct
  REGION 1..28: note = Synthetic
DCYRRFEQGVAKGIQCWCIEKDVTYKGV

SEQ ID NO: 1847 - protein, 28 aa, synthetic construct
  REGION 1..28: note = Synthetic
DCYRRFEQGVAKGIQCWCIEKDVTYKGV

SEQ ID NO: 1848 - protein, 35 aa, synthetic construct
  REGION 1..35: note = Synthetic
CKRACRTCCTHCRRVPPGTDGYANQTTCGGALKCP

SEQ ID NO: 1849 - protein, 28 aa, synthetic construct
  REGION 1..28: note = Synthetic
EVMKEAVERCNNACSEVCTKGSYAVATA

SEQ ID NO: 1850 - protein, 19 aa, synthetic construct
  REGION 1..19: note = Synthetic
EKAAGKAKKFGGKIKKWFG

SEQ ID NO: 1851 - protein, 26 aa, synthetic construct
  REGION 1..26: note = Synthetic
RYLQAYLKVIGNYTCHLLFGTHKKTL

SEQ ID NO: 1852 - protein, 13 aa, synthetic construct
  REGION 1..13: note = Synthetic
CSNFCHTWANVCL

SEQ ID NO: 1853 - protein, 33 aa, synthetic construct
  REGION 1..33: note = Synthetic
GLFSVVTGVLKAVGKNVAGSLLEQLKCKISGGC

SEQ ID NO: 1854 - protein, 23 aa, synthetic construct
  REGION 1..23: note = Synthetic
NFLNDIGKRGLQWSRSEQPSAYY

SEQ ID NO: 1855 - protein, 41 aa, synthetic construct
  REGION 1..41: note = Synthetic
DVCRNFMRRYQSRVTQGLVAGETAQQICEDLRLCIPSTGPL

SEQ ID NO: 1856 - protein, 16 aa, synthetic construct
  REGION 1..16: note = Synthetic
QVLSWIEEIIRKAESN

SEQ ID NO: 1857 - protein, 24 aa, synthetic construct
  REGION 1..24: note = Synthetic
AIENIADFFTRVCNTHNPSSRQRP

SEQ ID NO: 1858 - protein, 31 aa, synthetic construct
  REGION 1..31: note = Synthetic
RVVRECAHSCEQCASTLCAHGAGHIFNDAPV

SEQ ID NO: 1859 - protein, 19 aa, synthetic construct
  REGION 1..19: note = Synthetic
GILDFAKTVVGGIRNALGI

SEQ ID NO: 1860 - protein, 25 aa, synthetic construct
  REGION 1..25: note = Synthetic
GVLDILKGAAKDLAGHVATKVINKI

SEQ ID NO: 1861 - protein, 42 aa, synthetic construct
  REGION 1..42: note = Synthetic
KAVEKVKRVFSELQERGVYKAMSEFDIFINYIETYMTTKMQK

SEQ ID NO: 1862 - protein, 35 aa, synthetic construct
  REGION 1..35: note = Synthetic
FKELEKVGQRVRDAVISAGPAVATVAQATALAKGK

SEQ ID NO: 1863 - protein, 28 aa, synthetic construct
  REGION 1..28: note = Synthetic
HKAVNELIRVIHQLSPESSLRKRKRSRC

SEQ ID NO: 1864 - protein, 32 aa, synthetic construct
  REGION 1..32: note = Synthetic
WRRVMHCFSYCWRPLPADYKCNRFTVPNPPPK

SEQ ID NO: 1865 - protein, 29 aa, synthetic construct
  REGION 1..29: note = Synthetic
FLDTLKGAAKDVAGKLLEGLKCKIAGCKP

SEQ ID NO: 1866 - protein, 29 aa, synthetic construct
  REGION 1..29: note = Synthetic
GLWETIKNFGKKFTLNILHNLKCKIGGGC

SEQ ID NO: 1867 - protein, 13 aa, synthetic construct
  REGION 1..13: note = Synthetic
MEKAAGKIKNLFG

SEQ ID NO: 1868 - protein, 15 aa, synthetic construct
  REGION 1..15: note = Synthetic
LGHAVGNVLGGLFKS

SEQ ID NO: 1869 - protein, 16 aa, synthetic construct
  REGION 1..16: note = Synthetic
IKKIVQKMLDSGKKKN

SEQ ID NO: 1870 - protein, 24 aa, synthetic construct
  REGION 1..24: note = Synthetic
LWDDLKAAAKKVVSSLASAAIEKL

SEQ ID NO: 1871 - protein, 40 aa, synthetic construct
  REGION 1..40: note = Synthetic
DHLKDLGSRARAWLRSSKDNLLNKAHSLCPQLLCRPSDQN

SEQ ID NO: 1872 - protein, 21 aa, synthetic construct
  REGION 1..21: note = Synthetic
HNAAKAGFKLIKPIEKLIMPK

SEQ ID NO: 1873 - protein, 12 aa, synthetic construct
  REGION 1..12: note = Synthetic
ANEVYKKCPGMP

SEQ ID NO: 1874 - protein, 25 aa, synthetic construct
  REGION 1..25: note = Synthetic
NMAKKCRDCCGGNGKCFGPQCLCNR

SEQ ID NO: 1875 - protein, 33 aa, synthetic construct
  REGION 1..33: note = Synthetic
KVMNYLVETMLKLFQTQFIHLILHPLTFIYSAR

SEQ ID NO: 1876 - protein, 25 aa, synthetic construct
  REGION 1..25: note = Synthetic
NMAKKCRDCCGGNGKCFGPQCLCNR

SEQ ID NO: 1877 - protein, 26 aa, synthetic construct
  REGION 1..26: note = Synthetic
NMAKKCRDCCGGNGKCFGYQCLCNRG

SEQ ID NO: 1878 - protein, 21 aa, synthetic construct
  REGION 1..21: note = Synthetic
VYQCMDRIPNLCQRRCTAAAR

SEQ ID NO: 1879 - protein, 21 aa, synthetic construct
  REGION 1..21: note = Synthetic
VYQCMDRIPNLCQRRCTAAAR

SEQ ID NO: 1880 - protein, 21 aa, synthetic construct
  REGION 1..21: note = Synthetic
VYQCMDRIPNLCQRRCTAAAR

SEQ ID NO: 1881 - protein, 42 aa, synthetic construct
  REGION 1..42: note = Synthetic
GEEAMKKYSQILSHFEKLEPQAAVVKALGELDILLQWMEETE

SEQ ID NO: 1882 - protein, 19 aa, synthetic construct
  REGION 1..19: note = Synthetic
LYRYLTRFLHRYPIYYIRY

SEQ ID NO: 1883 - protein, 19 aa, synthetic construct
  REGION 1..19: note = Synthetic
KWVQNAMEYLNQKSQTLKS

SEQ ID NO: 1884 - protein, 21 aa, synthetic construct
  REGION 1..21: note = Synthetic
SDFENYIRTVSTTISPLLLIP

SEQ ID NO: 1885 - protein, 27 aa, synthetic construct
  REGION 1..27: note = Synthetic
KECWSVCEKLYNTSRGKCMNKKCRCYS

SEQ ID NO: 1886 - protein, 20 aa, synthetic construct
  REGION 1..20: note = Synthetic
VQRCLSTLKQGPRSGNKVIA

SEQ ID NO: 1887 - protein, 30 aa, synthetic construct
  REGION 1..30: note = Synthetic
LTKLLDSMHDVVENLLSFCFQTFLDKSMSI

SEQ ID NO: 1888 - protein, 25 aa, synthetic construct
  REGION 1..25: note = Synthetic
ENIRRVFNDCRDIIQRMHLRQYELL

SEQ ID NO: 1889 - protein, 22 aa, synthetic construct
  REGION 1..22: note = Synthetic
ALNRLQAALQDMLRRLDLSPGC

SEQ ID NO: 1890 - protein, 27 aa, synthetic construct
  REGION 1..27: note = Synthetic
KLFRIYSNFLRGKLKLYTGEACRRGDR

SEQ ID NO: 1891 - protein, 22 aa, synthetic construct
  REGION 1..22: note = Synthetic
SAILNGLGKGMNFIENTFSFCV

SEQ ID NO: 1892 - protein, 30 aa, synthetic construct
  REGION 1..30: note = Synthetic
WNNAVDSVFTTIENVPSSVNTVANRLINNK

SEQ ID NO: 1893 - protein, 20 aa, synthetic construct
  REGION 1..20: note = Synthetic
CQNIQSLLNTIVKWLFIVHL

SEQ ID NO: 1894 - protein, 27 aa, synthetic construct
  REGION 1..27: note = Synthetic
KLFRVYSNFLRGKLKLYTGEACRRGDR

SEQ ID NO: 1895 - protein, 27 aa, synthetic construct
  REGION 1..27: note = Synthetic
KLFRVYSNFLRGKLKLYTGEACRRGDR

SEQ ID NO: 1896 - protein, 22 aa, synthetic construct
  REGION 1..22: note = Synthetic
LLKLAAKGVAKVIPHLIPSRQQ

SEQ ID NO: 1897 - protein, 17 aa, synthetic construct
  REGION 1..17: note = Synthetic
ARLSDILHNVNRRAGGV

SEQ ID NO: 1898 - protein, 23 aa, synthetic construct
  REGION 1..23: note = Synthetic
FLKNAFKVVDQVFQKKLRLYLLF

SEQ ID NO: 1899 - protein, 32 aa, synthetic construct
  REGION 1..32: note = Synthetic
GHICESFKSFCKDSGRNGVKLRANCKKTCGLC

SEQ ID NO: 1900 - protein, 19 aa, synthetic construct
  REGION 1..19: note = Synthetic
REFVQLLESLLQKAMTRLV

SEQ ID NO: 1901 - protein, 16 aa, synthetic construct
  REGION 1..16: note = Synthetic
LLDFLKAAGKGLVTNL

SEQ ID NO: 1902 - protein, 19 aa, synthetic construct
  REGION 1..19: note = Synthetic
LLGSIGNAIGAFIANKLKP

SEQ ID NO: 1903 - protein, 42 aa, synthetic construct
  REGION 1..42: note = Synthetic
KAVEQVKRAFSKLQDRGVYKAMSEFDIFINYIETYVTTKMQK

SEQ ID NO: 1904 - protein, 12 aa, synthetic construct
  REGION 1..12: note = Synthetic
WFDVVKHIASAV

SEQ ID NO: 1905 - protein, 20 aa, synthetic construct
  REGION 1..20: note = Synthetic
AKKALAKAKTVLKLLLNKDN

SEQ ID NO: 1906 - protein, 23 aa, synthetic construct
  REGION 1..23: note = Synthetic
VYQCMDRVPNFCQRRCNGAVAAH

SEQ ID NO: 1907 - protein, 21 aa, synthetic construct
  REGION 1..21: note = Synthetic
KAVEFLNKWITFCQSIYSTMT

SEQ ID NO: 1908 - protein, 27 aa, synthetic construct
  REGION 1..27: note = Synthetic
KAVLDCLKAAGSSLSKAAITAIYNKIT

SEQ ID NO: 1909 - protein, 27 aa, synthetic construct
  REGION 1..27: note = Synthetic
KLFRIYSNFLRGKLKLYTGEACRRGDR

SEQ ID NO: 1910 - protein, 19 aa, synthetic construct
  REGION 1..19: note = Synthetic
EKAAGKAKKFGGKVKKWFG

SEQ ID NO: 1911 - protein, 32 aa, synthetic construct
  REGION 1..32: note = Synthetic
INSFFEKATEFVKKNIVLSSGFVGGFLLGLAS

SEQ ID NO: 1912 - protein, 22 aa, synthetic construct
  REGION 1..22: note = Synthetic
AYYKRCARLLTRLAMSPLCMQS

SEQ ID NO: 1913 - protein, 33 aa, synthetic construct
  REGION 1..33: note = Synthetic
SQLTNLIRSVRTVMRVPLIIVNSVAIVLLLLFG

SEQ ID NO: 1914 - protein, 17 aa, synthetic construct
  REGION 1..17: note = Synthetic
REIANLVDSCVQKCRNK

SEQ ID NO: 1915 - protein, 33 aa, synthetic construct
  REGION 1..33: note = Synthetic
FGRRGLNDLDDLDELFDGEISQADVDFLNELMR

SEQ ID NO: 1916 - protein, 19 aa, synthetic construct
  REGION 1..19: note = Synthetic
KCIDLVNNVLKEVASSRKT

SEQ ID NO: 1917 - protein, 27 aa, synthetic construct
  REGION 1..27: note = Synthetic
AFNAVKRLLDQARQLGRVNEENQGVQI

SEQ ID NO: 1918 - protein, 40 aa, synthetic construct
  REGION 1..40: note = Synthetic
EWVQRYMKNLDAKQKKASPRARAVAVKGPVQRYPGNQTTC

SEQ ID NO: 1919 - protein, 19 aa, synthetic construct
  REGION 1..19: note = Synthetic
ECVYFLQKFLKYATKHLGR

SEQ ID NO: 1920 - protein, 41 aa, synthetic construct
  REGION 1..41: note = Synthetic
CLKGIARGIHNLNEDNARSIPPKCGVNLPYTISLNIDCSRV

SEQ ID NO: 1921 - protein, 27 aa, synthetic construct
  REGION 1..27: note = Synthetic
GHQAIETGLNIFRGLFKGKKKNKKTKG

SEQ ID NO: 1922 - protein, 24 aa, synthetic construct
  REGION 1..24: note = Synthetic
DCYSACKKLVGKATGKCTNGRCDC

SEQ ID NO: 1923 - protein, 42 aa, synthetic construct
  REGION 1..42: note = Synthetic
KLAKDITKMAKQRAKEYVVKKLNGPPEEEVAAIDALMNSLDY

SEQ ID NO: 1924 - protein, 33 aa, synthetic construct
  REGION 1..33: note = Synthetic
LGKRGLNELDDLDELFDGEISQADIDFLKELMS

SEQ ID NO: 1925 - protein, 13 aa, synthetic construct
  REGION 1..13: note = Synthetic
YSRGCSKIARCRS

SEQ ID NO: 1926 - protein, 19 aa, synthetic construct
  REGION 1..19: note = Synthetic
KKVQKCLNKCYDICDVKLI

SEQ ID NO: 1927 - protein, 15 aa, synthetic construct
  REGION 1..15: note = Synthetic
NSLASHLTSFVSRWQ

SEQ ID NO: 1928 - protein, 21 aa, synthetic construct
  REGION 1..21: note = Synthetic
AGTVAKDVVKLVNDLRSCMSV

SEQ ID NO: 1929 - protein, 17 aa, synthetic construct
  REGION 1..17: note = Synthetic
NWVKRAVNLLSLRVKKM

SEQ ID NO: 1930 - protein, 21 aa, synthetic construct
  REGION 1..21: note = Synthetic
SQVFRYVTDMVKSVGVDCGRS

SEQ ID NO: 1931 - protein, 19 aa, synthetic construct
  REGION 1..19: note = Synthetic
ISNFLSTLMSIFTNPDSCK

SEQ ID NO: 1932 - protein, 33 aa, synthetic construct
  REGION 1..33: note = Synthetic
LGKRGLNNLNDFDELFDGEITKADLDFMREIMK

SEQ ID NO: 1933 - protein, 32 aa, synthetic construct
  REGION 1..32: note = Synthetic
LWSKIKAAGKEAAKAAAKAAGKAALNAVSEAV

SEQ ID NO: 1934 - protein, 32 aa, synthetic construct; identical to SEQ ID NO: 1933
  REGION 1..32: note = Synthetic

SEQ ID NO: 1935 - protein, 20 aa, synthetic construct
  REGION 1..20: note = Synthetic
IASVAAKVFSKIFCAISKKC

SEQ ID NO: 1936 - protein, 33 aa, synthetic construct
  REGION 1..33: note = Synthetic
RSLGGVISGAKKVAKVAIPIGKAVLPVVAKLVG

SEQ ID NO: 1937 - protein, 16 aa, synthetic construct
  REGION 1..16: note = Synthetic
LQAFLAKMKEIAAQTL

SEQ ID NO: 1938 - protein, 12 aa, synthetic construct
  REGION 1..12: note = Synthetic
NPLTDIINKLTD

SEQ ID NO: 1939 - protein, 33 aa, synthetic construct
  REGION 1..33: note = Synthetic
FGKRGLENMDKFDELFDGDLSEADLDFLKELMR

SEQ ID NO: 1940 - protein, 12 aa, synthetic construct
  REGION 1..12: note = Synthetic
KAALNEINQIVQ

SEQ ID NO: 1941 - protein, 39 aa, synthetic construct
  REGION 1..39: note = Synthetic
VEGLCSKFPDCNKHCKEQGFLGGQCLKLGVNMLCFCIHT

SEQ ID NO: 1942 - protein, 14 aa, synthetic construct
  REGION 1..14: note = Synthetic
RKWATPCKEIYSPN

SEQ ID NO: 1943 - protein, 42 aa, synthetic construct
  REGION 1..42: note = Synthetic
SKWIAPLERLVAFPSGVAGGVGITCWLVVCNKVVALILQAVS

SEQ ID NO: 1944 - protein, 21 aa, synthetic construct
  REGION 1..21: note = Synthetic
RVMEQVFSYLLDIIRIDVDVQ

SEQ ID NO: 1945 - protein, 23 aa, synthetic construct
  REGION 1..23: note = Synthetic
KSCKEFMENMISLAKALSAQRSP

SEQ ID NO: 1946 - protein, 33 aa, synthetic construct
  REGION 1..33: note = Synthetic
LGRRGLNELDNLDELFDGEISQADIDFLKELMS

SEQ ID NO: 1947 - protein, 39 aa, synthetic construct
  REGION 1..39: note = Synthetic
VEGLCSKFPDCNKHCKEQKFPGGTCLKLGVNMMCTCIYS

SEQ ID NO: 1948 - protein, 14 aa, synthetic construct
  REGION 1..14: note = Synthetic
YDAVYNGCLDKLRH

SEQ ID NO: 1949 - protein, 31 aa, synthetic construct
  REGION 1..31: note = Synthetic
GKGYIRGCADTCPKLQNRDVIFCCSTDKCNL

SEQ ID NO: 1950 - protein, 13 aa, synthetic construct
  REGION 1..13: note = Synthetic
KAALNAVTDMVNQ

SEQ ID NO: 1951 - protein, 22 aa, synthetic construct
  REGION 1..22: note = Synthetic
CKRCCSYAGEAMDKVTEAQPHN

SEQ ID NO: 1952 - protein, 30 aa, synthetic construct; identical to SEQ ID NO: 1892
  REGION 1..30: note = Synthetic

SEQ ID NO: 1953 - protein, 27 aa, synthetic construct
  REGION 1..27: note = Synthetic
REVDRLASDLQRLAKFQQHSTKHYGFL

SEQ ID NO: 1954 - protein, 33 aa, synthetic construct
  REGION 1..33: note = Synthetic
FGKRGLRNFDDLDDTFEPEMSEADLKYLQDLLR

SEQ ID NO: 1955 - protein, 25 aa, synthetic construct
  REGION 1..25: note = Synthetic
RGLWSTIKNVAAAAGKAALGALGEQ

SEQ ID NO: 1956 - protein, 28 aa, synthetic construct
  REGION 1..28: note = Synthetic
LNGYIDHFKNFRKRDAELEELLSKLPIY

SEQ ID NO: 1957 - protein, 41 aa, synthetic construct
  REGION 1..41: note = Synthetic
GILDTIKSIASKVWNSKTVQDLKRKGINWVANKLGVSPQAA

SEQ ID NO: 1958 - protein, 41 aa, synthetic construct
  REGION 1..41: note = Synthetic
LLDLAKHVIGIASKLGKRSEEKRGLLDFAKHVIGIASKLGK

SEQ ID NO: 1959 - protein, 14 aa, synthetic construct
  REGION 1..14: note = Synthetic
SLLSSAFSLCQQCC

SEQ ID NO: 1960 - protein, 28 aa, synthetic construct
  REGION 1..28: note = Synthetic
DCYRRFEQGVAKGVQCWCIEKDVTYKGV

SEQ ID NO: 1961 - protein, 21 aa, synthetic construct
  REGION 1..21: note = Synthetic
GIFGKILGAGKKVLCGLSGLC

SEQ ID NO: 1962 - protein, 22 aa, synthetic construct
  REGION 1..22: note = Synthetic
CKRCCSYAGEAMDKVTEAQPHN

SEQ ID NO: 1963 - protein, 26 aa, synthetic construct
  REGION 1..26: note = Synthetic
VGTALGSLAEELNGYNRKKGGFSFRF

SEQ ID NO: 1964 - protein, 18 aa, synthetic construct
  REGION 1..18: note = Synthetic
DKIVEVVKEMGKAGLNAA

SEQ ID NO: 1965 - protein, 22 aa, synthetic construct
  REGION 1..22: note = Synthetic
VKKMLKDVPKLATSSTKIAKQN

SEQ ID NO: 1966 - protein, 23 aa, synthetic construct
  REGION 1..23: note = Synthetic
VENCGDACVNFCNGDAGLTSLDA

SEQ ID NO: 1967 - protein, 19 aa, synthetic construct
  REGION 1..19: note = Synthetic
KWVQDYVKHLDQRTQTPKT

SEQ ID NO: 1968 - protein, 29 aa, synthetic construct
  REGION 1..29: note = Synthetic
SRADQFANEWGRSGKDPNFFRPPGLPSKY

SEQ ID NO: 1969 - protein, 14 aa, synthetic construct
  REGION 1..14: note = Synthetic
KVGGLLGGLLGGIL

SEQ ID NO: 1970 - protein, 14 aa, synthetic construct
  REGION 1..14: note = Synthetic
KVGGLLGGLLGGIL

SEQ ID NO: 1971 - protein, 30 aa, synthetic construct
  REGION 1..30: note = Synthetic
GWTQIKGCIHRCPESTPNEKYQCCSTDNCI

SEQ ID NO: 1972 - protein, 29 aa, synthetic construct
  REGION 1..29: note = Synthetic
KGKQLLKDYANRVLNGPEEEAAAPAERRR

SEQ ID NO: 1973 - protein, 13 aa, synthetic construct
  REGION 1..13: note = Synthetic
KIIDKMLNKASAN

SEQ ID NO: 1974 - protein, 13 aa, synthetic construct
  REGION 1..13: note = Synthetic
KIIDKMLNKASAN

SEQ ID NO: 1975 - protein, 13 aa, synthetic construct
  REGION 1..13: note = Synthetic
KIIDKMLNKASAN

SEQ ID NO: 1976 - protein, 30 aa, synthetic construct
  REGION 1..30: note = Synthetic
LWKTMLKKLGTMALHAGKAAFGAAADTISQ

SEQ ID NO: 1977 - protein, 33 aa, synthetic construct
  REGION 1..33: note = Synthetic
LWKTMLKKLGTMALHAGKAALGAAADTISQGTQ

SEQ ID NO: 1978 - protein, 22 aa, synthetic construct
  REGION 1..22: note = Synthetic
NAILNGLGKGMNFMENTFSFCV

SEQ ID NO: 1979 - protein, 13 aa, synthetic construct
  REGION 1..13: note = Synthetic
KGLIQTVGDFIGI

SEQ ID NO: 1980 - protein, 21 aa, synthetic construct
  REGION 1..21: note = Synthetic
GIFGKILGVGKKVLCGLSGMC

SEQ ID NO: 1981 - protein, 32 aa, synthetic construct
  REGION 1..32: note = Synthetic
LWKTMLKKLGTVALHAGKAALGAAADTISQGA

SEQ ID NO: 1982 - protein, 33 aa, synthetic construct
  REGION 1..33: note = Synthetic
IGKRGLKKLDQLDDTFDSDLSDADVKLLREMFK

SEQ ID NO: 1983 - protein, 30 aa, synthetic construct
  REGION 1..30: note = Synthetic
CCRKGYNGCKRCCSYAGEAMDKVTEAQPHN

SEQ ID NO: 1984 - protein, 20 aa, synthetic construct
  REGION 1..20: note = Synthetic
LLGSIGKVLGGYLAEKLKPK

SEQ ID NO: 1985 - protein, 15 aa, synthetic construct
  REGION 1..15: note = Synthetic
YRIKKFLKRCCKKIK

SEQ ID NO: 1986 - protein, 22 aa, synthetic construct
  REGION 1..22: note = Synthetic
EEFQEFMQDIEQAREEELLSRQ

SEQ ID NO: 1987 - protein, 37 aa, synthetic construct
  REGION 1..37: note = Synthetic
RDCKGLFRQCKKSSECCKGSSCESDLTGLCIFNLPGR

SEQ ID NO: 1988 - protein, 39 aa, synthetic construct
  REGION 1..39: note = Synthetic
VAHWLGGLLSRAGSVANTNLLPTSMGFKVYNRRRRELKA

SEQ ID NO: 1989 - protein, 25 aa, synthetic construct
  REGION 1..25: note = Synthetic
FNRASRLANEIGDLLQSHLIKLKME

SEQ ID NO: 1990 - protein, 31 aa, synthetic construct
  REGION 1..31: note = Synthetic
KWNSAVDSVFTTIENVPSSVNTVANRLINNK

SEQ ID NO: 1991 - protein, 21 aa, synthetic construct
  REGION 1..21: note = Synthetic
VGAALKVLANVLPPVISWIKQ

SEQ ID NO: 1992 - protein, 13 aa, synthetic construct
  REGION 1..13: note = Synthetic
AGKAALNKIAEAV

SEQ ID NO: 1993 - protein, 33 aa, synthetic construct
  REGION 1..33: note = Synthetic
EELDRLAHTVLNAVDHLATKLNRNGRSADPVGH

SEQ ID NO: 1994 - protein, 17 aa, synthetic construct
  REGION 1..17: note = Synthetic
ILSSIMGTLGKIVGLAP

SEQ ID NO: 1995 - protein, 19 aa, synthetic construct
  REGION 1..19: note = Synthetic
KWVQDAVKQLDKKAQTPKP

SEQ ID NO: 1996 - protein, 26 aa, synthetic construct
  REGION 1..26: note = Synthetic
RSAISMVTELLRAAKSGPGGGGTHFP

SEQ ID NO: 1997 - protein, 13 aa, synthetic construct
  REGION 1..13: note = Synthetic
KWVQEYINYLEMS

SEQ ID NO: 1998 - protein, 13 aa, synthetic construct
  REGION 1..13: note = Synthetic
KWVQEYINYLEMS

SEQ ID NO: 1999 - protein, 16 aa, synthetic construct
  REGION 1..16: note = Synthetic
WTQGLDNVFNMMFSYL

SEQ ID NO: 2000 - protein, 17 aa, synthetic construct
  REGION 1..17: note = Synthetic
IKTLQRVVRKIATDIDE

SEQ ID NO: 2001 - protein, 28 aa, synthetic construct
  REGION 1..28: note = Synthetic
QTAQNAIRNVINRLHGLDNFLFQLQQRQ

SEQ ID NO: 2002 - protein, 32 aa, synthetic construct
  REGION 1..32: note = Synthetic
LFNDLEHVCDDCYNLYRTSYVASACRSNCYSN

SEQ ID NO: 2003 - protein, 32 aa, synthetic construct; identical to SEQ ID NO: 2002
  REGION 1..32: note = Synthetic

SEQ ID NO: 2004 - protein, 32 aa, synthetic construct; identical to SEQ ID NO: 2002
  REGION 1..32: note = Synthetic

SEQ ID NO: 2005 - protein, 32 aa, synthetic construct
  REGION 1..32: note = Synthetic
FRDCCRDCKTAFSHLSCNAWYNGNYKLAKEVI

SEQ ID NO: 2006 - protein, 37 aa, synthetic construct
  REGION 1..37: note = Synthetic
RKAIHELIQVMAELSPAPKIGKRKRSQTLFRGRRASQ

SEQ ID NO: 2007 - protein, 29 aa, synthetic construct
  REGION 1..29: note = Synthetic
KGKQLLKDYANKVLNGPEEEAAAPAERRR

SEQ ID NO: 2008 - protein, 33 aa, synthetic construct
  REGION 1..33: note = Synthetic
LRTASYFISTLKKAAQKQLKAVSFFFQVMASLV

SEQ ID NO: 2009 - protein, 14 aa, synthetic construct
  REGION 1..14: note = Synthetic
TLINYFCENIRNCM

SEQ ID NO: 2010 - protein, 17 aa, synthetic construct
  REGION 1..17: note = Synthetic
EKCIYLMRKCFSFMTNQ

SEQ ID NO: 2011 - protein, 18 aa, synthetic construct
  REGION 1..18: note = Synthetic
DKIIDVVKEMGKAGLQAA

SEQ ID NO: 2012 - protein, 32 aa, synthetic construct
  REGION 1..32: note = Synthetic
ILDTLKNLAKTAGKGALQGLVKMASCKLSGQC

SEQ ID NO: 2013 - protein, 28 aa, synthetic construct
  REGION 1..28: note = Synthetic
DVGATWSKVIRGPGRSKPNWSIGGTYRW

SEQ ID NO: 2014 - protein, 19 aa, synthetic construct
  REGION 1..19: note = Synthetic
VLSQYLECVTQACGRTIKM

SEQ ID NO: 2015 - protein, 18 aa, synthetic construct
  REGION 1..18: note = Synthetic
KLVDSLLQVLKEKGGTAS

SEQ ID NO: 2016 - protein, 15 aa, synthetic construct
  REGION 1..15: note = Synthetic
LNNCGKQVPNGFECT

SEQ ID NO: 2017 - protein, 16 aa, synthetic construct
  REGION 1..16: note = Synthetic
AHACFQRIHRLTRTMR

SEQ ID NO: 2018 - protein, 13 aa, synthetic construct
  REGION 1..13: note = Synthetic
VTSVLAAILKPCF

SEQ ID NO: 2019 - protein, 18 aa, synthetic construct
  REGION 1..18: note = Synthetic
GDKLYREIQNWEGFTRRP

SEQ ID NO: 2020 - protein, 11 aa, synthetic construct
  REGION 1..11: note = Synthetic
LQDLNTVLRHF

SEQ ID NO: 2021 - protein, 41 aa, synthetic construct
  REGION 1..41: note = Synthetic
YKRGCEKITRCERDRRKQAHLRNPRKVLDVVAVMAKAKQLY

SEQ ID NO: 2022 - protein, 29 aa, synthetic construct
  REGION 1..29: note = Synthetic
SRADQFANEWGRSGKDPNFFRPPGLPSKY

SEQ ID NO: 2023 - protein, 22 aa, synthetic construct
  REGION 1..22: note = Synthetic
ALSRLQAALQDMLRRLDLSPGC

SEQ ID NO: 2024 - protein, 26 aa, synthetic construct
  REGION 1..26: note = Synthetic
NMARKCRECCGGNGKCFGPQCLCNRE

SEQ ID NO: 2025 - protein, 20 aa, synthetic construct
  REGION 1..20: note = Synthetic
WVDAFSTAAYIINRLLVPLL

SEQ ID NO: 2026 - protein, 25 aa, synthetic construct
  REGION 1..25: note = Synthetic
ENIRRVFNDCRDIIQRMHLRQYELL

SEQ ID NO: 2027 - protein, 34 aa, synthetic construct
  REGION 1..34: note = Synthetic
VRKIYQAAKYLPNICKIQQVGVCPFQIPSIPSYY

SEQ ID NO: 2028 - protein, 23 aa, synthetic construct
  REGION 1..23: note = Synthetic
WGDDMNDYCTGISSDCPRNPWKD

SEQ ID NO: 2029 - protein, 30 aa, synthetic construct
  REGION 1..30: note = Synthetic
RGFMDTAKNVAKNVAVTLIDKLRCKVTGGC

SEQ ID NO: 2030 - protein, 16 aa, synthetic construct
  REGION 1..16: note = Synthetic
IKDICKKVLEQFRDLL

SEQ ID NO: 2031 - protein, 37 aa, synthetic construct
  REGION 1..37: note = Synthetic
RKAIHELIQVMAELSPAPKIGKRRRSQTLFRGRRASQ

SEQ ID NO: 2032 - protein, 31 aa, synthetic construct
  REGION 1..31: note = Synthetic
TKCSTLLKQIRECASGCVNLNDDPVNKLSTR

SEQ ID NO: 2033 - protein, 32 aa, synthetic construct
  REGION 1..32: note = Synthetic
WKKVGSAAWGGVKAAAKGAAVGGLNALAKHIQ

SEQ ID NO: 2034 - protein, 17 aa, synthetic construct
  REGION 1..17: note = Synthetic
VQRVVEKFLKRAESQNS

SEQ ID NO: 2035 - protein, 16 aa, synthetic construct
  REGION 1..16: note = Synthetic
FQRFLETAYRALRHLA

SEQ ID NO: 2036 - protein, 24 aa, synthetic construct
  REGION 1..24: note = Synthetic
KGKEMLKDYAKGLLEGGSEEVPGQ

SEQ ID NO: 2037 - protein, 22 aa, synthetic construct
  REGION 1..22: note = Synthetic
IAEKVFEILQEAWKEFNSVTFG

SEQ ID NO: 2038 - protein, 17 aa, synthetic construct
  REGION 1..17: note = Synthetic
EMGSIISQAIRNAKKHV

SEQ ID NO: 2039 - protein, 19 aa, synthetic construct
  REGION 1..19: note = Synthetic
VKDIATALNQIIRRIQEES

SEQ ID NO: 2040 - protein, 19 aa, synthetic construct
  REGION 1..19: note = Synthetic
RWSSGFHKVFAEGTKLIVI

SEQ ID NO: 2041 - protein, 24 aa, synthetic construct
  REGION 1..24: note = Synthetic
GLFKVLGSVAKHLLPHVVPVIAEK

SEQ ID NO: 2042 - protein, 23 aa, synthetic construct
  REGION 1..23: note = Synthetic
GIFRFARGYVEARTKSFDLKAGC

SEQ ID NO: 2043 - protein, 31 aa, synthetic construct
  REGION 1..31: note = Synthetic
RSLWSKIKEMAATAGKAALNAVTGMVNQGEQ

SEQ ID NO: 2044 - protein, 19 aa, synthetic construct
  REGION 1..19: note = Synthetic
EKAADKAKKFGGKTKKWFG

SEQ ID NO: 2045 - protein, 20 aa, synthetic construct
  REGION 1..20: note = Synthetic
LLASLGKVFGGYLAEKLKPK

SEQ ID NO: 2046 - protein, 19 aa, synthetic construct
  REGION 1..19: note = Synthetic
KCLKTMYDCCKYSCSRGRC

SEQ ID NO: 2047 - protein, 17 aa, synthetic construct
  REGION 1..17: note = Synthetic
FLNKWITFCQSIYSTMT

SEQ ID NO: 2048 - protein, 32 aa, synthetic construct
  REGION 1..32: note = Synthetic
LFSLIKAGAKFLGKNLLKQGACYAACKASKQC

SEQ ID NO: 2049 - protein, 14 aa, synthetic construct
  REGION 1..14: note = Synthetic
EKFKRIANSFLQKN

SEQ ID NO: 2050 - protein, 15 aa, synthetic construct
  REGION 1..15: note = Synthetic
YQLLSFIRSLAHDIN

SEQ ID NO: 2051 - protein, 15 aa, synthetic construct
  REGION 1..15: note = Synthetic
YRIKKFLKRCCKKIK

SEQ ID NO: 2052 - protein, 15 aa, synthetic construct
  REGION 1..15: note = Synthetic
YRIKKFLKRCCKKIK

SEQ ID NO: 2053 - protein, 14 aa, synthetic construct
  REGION 1..14: note = Synthetic
LKELAGGLVTGIQS

SEQ ID NO: 2054 - protein, 31 aa, synthetic construct
  REGION 1..31: note = Synthetic
QDCYEALHKCMASHSKPFSCSMKFHMCLQQQ

SEQ ID NO: 2055 - protein, 26 aa, synthetic construct
  REGION 1..26: note = Synthetic
CDPCRKCVQSFHSGVYMCSDKKSNCS

SEQ ID NO: 2056 - protein, 32 aa, synthetic construct
  REGION 1..32: note = Synthetic
IMSIVKDVAKNAAKEAAKGALSTLSCKLAKTC

SEQ ID NO: 2057 - protein, 23 aa, synthetic construct
  REGION 1..23: note = Synthetic
DAAKLFSSWVDKLSKDIEENKKQ

SEQ ID NO: 2058 - protein, 19 aa, synthetic construct
  REGION 1..19: note = Synthetic
RDVLTRFKSWFKRVFGKKQ

SEQ ID NO: 2059 - protein, 15 aa, synthetic construct
  REGION 1..15: note = Synthetic
VENLVSFANSFIKTA

SEQ ID NO: 2060 - protein, 37 aa, synthetic construct
  REGION 1..37: note = Synthetic
RECRKMFGGCSKHEDCCAHLACKRTFNYCAWDGSFSK

SEQ ID NO: 2061 - protein, 29 aa, synthetic construct
  REGION 1..29: note = Synthetic
QSCIDHCKAIGEVIYVCFTYHCYCRKPPM

SEQ ID NO: 2062 - protein, 16 aa, synthetic construct
  REGION 1..16: note = Synthetic
REIPQCINSICKCMKG

SEQ ID NO: 2063 - protein, 28 aa, synthetic construct
  REGION 1..28: note = Synthetic
DIVKLLESIGSQSGTPSKIAKISNSGEL

SEQ ID NO: 2064 - protein, 32 aa, synthetic construct
  REGION 1..32: note = Synthetic
LFSLIKAGAKFLGKNLLKQGAQYAACKVSKEC

SEQ ID NO: 2065 - protein, 31 aa, synthetic construct
  REGION 1..31: note = Synthetic
LWSKIKEAGKAALTAAGKAALGAVSDAVGEQ

SEQ ID NO: 2066 - protein, 15 aa, synthetic construct
  REGION 1..15: note = Synthetic
YCRLGNTFYRLCCRQ

SEQ ID NO: 2067 - protein, 15 aa, synthetic construct
  REGION 1..15: note = Synthetic
YCRLGNTFYRLCCRQ

SEQ ID NO: 2068 - protein, 25 aa, synthetic construct
  REGION 1..25: note = Synthetic
WKDILKNAGKAALNEINQLVNQGEL

SEQ ID NO: 2069 - protein, 16 aa, synthetic construct
  REGION 1..16: note = Synthetic
VDSAIEKALTVWEEVT

SEQ ID NO: 2070 - protein, 37 aa, synthetic construct
  REGION 1..37: note = Synthetic
RGLWSNIKTAGKEAAKAALKAAGKAALGAVTDAVGEQ

SEQ ID NO: 2071 - protein, 12 aa, synthetic construct
  REGION 1..12: note = Synthetic
NFGGKVITIFKA

SEQ ID NO: 2072 - protein, 32 aa, synthetic construct
  REGION 1..32: note = Synthetic
IMDTLKNLAKTAGKGALQSLLNKASCKLSGQC

SEQ ID NO: 2073 - protein, 32 aa, synthetic construct
  REGION 1..32: note = Synthetic
IMDTLKNLAKTAGKGALQSLVKMASCKLSGQC

SEQ ID NO: 2074 - protein, 14 aa, synthetic construct
  REGION 1..14: note = Synthetic
LSGIIDSVANAIKG

SEQ ID NO: 2075 - protein, 26 aa, synthetic construct
  REGION 1..26: note = Synthetic
GQCDECCKKAGDRAGNCVYFKCKCNP

SEQ ID NO: 2076 - protein, 26 aa, synthetic construct
  REGION 1..26: note = Synthetic
GQCDECCKKAGDRAGNCVYLKCKCNQ

SEQ ID NO: 2077 - protein, 42 aa, synthetic construct
  REGION 1..42: note = Synthetic
CITFCNKCCRKCLCVPPGYYGNKQVCSCYNNWKTQEGGPKCP

SEQ ID NO: 2078 - protein, 20 aa, synthetic construct
  REGION 1..20: note = Synthetic
LRDYLRQINEYFAIIGRPRF

SEQ ID NO: 2079 - protein, 35 aa, synthetic construct
  REGION 1..35: note = Synthetic
SHFQEFLEKACHFLKLPLGTNITLLSPGSPHRVTC

SEQ ID NO: 2080 - protein, 15 aa, synthetic construct
  REGION 1..15: note = Synthetic
KYIEKVVDKARTVVG

SEQ ID NO: 2081 - protein, 26 aa, synthetic construct
  REGION 1..26: note = Synthetic
WAQSLVSLFQALRHDLMRSSQPGVPP

SEQ ID NO: 2082 - protein, 39 aa, synthetic construct
  REGION 1..39: note = Synthetic
ENFFKEIERAGQRIRDAIISAAPAVETLAQAQKIIKGGD

SEQ ID NO: 2083 - protein, 23 aa, synthetic construct
  REGION 1..23: note = Synthetic
FSQARSCCSRLGRCCHVGKGYSG

SEQ ID NO: 2084 - protein, 23 aa, synthetic construct
  REGION 1..23: note = Synthetic
FSQARSCCSRLGRCCHVGKGYSG

SEQ ID NO: 2085 - protein, 15 aa, synthetic construct
  REGION 1..15: note = Synthetic
KYIEKVVDKAKTVVG

SEQ ID NO: 2086 - protein, 15 aa, synthetic construct
  REGION 1..15: note = Synthetic
KYIEKVVDKAKTVVG

SEQ ID NO: 2087 - protein, 15 aa, synthetic construct
  REGION 1..15: note = Synthetic
KYIEKVVDKAKTVVG

SEQ ID NO: 2088 - protein, 15 aa, synthetic construct
  REGION 1..15: note = Synthetic
KYIEKVVDKAKTVVG

SEQ ID NO: 2089 - protein, 42 aa, synthetic construct
  REGION 1..42: note = Synthetic
ITQAIQCAKRVVRDPQGIRAWVAWQRHCKNRDLSGYIRNCGV

SEQ ID NO: 2090 - protein, 17 aa, synthetic construct
  REGION 1..17: note = Synthetic
DQAEKIAKDIIKKVRGH

SEQ ID NO: 2091 - protein, 23 aa, synthetic construct
  REGION 1..23: note = Synthetic
ERCTKLANTFFQQCKTMSEYTVY

SEQ ID NO: 2092 - protein, 18 aa, synthetic construct
  REGION 1..18: note = Synthetic
KRVKRFCKKACRKASQSK

SEQ ID NO: 2093 - protein, 18 aa, synthetic construct
  REGION 1..18: note = Synthetic
KRVKRFCKKACRKASQSK

SEQ ID NO: 2094 - protein, 20 aa, synthetic construct
  REGION 1..20: note = Synthetic
LLASLGKVLGGYLAEKLKPK

SEQ ID NO: 2095 - protein, 16 aa, synthetic construct
  REGION 1..16: note = Synthetic
CATLLRECAKECSNVH

SEQ ID NO: 2096 - protein, 36 aa, synthetic construct
  REGION 1..36: note = Synthetic
IFSLVKGAAKLAGKGLAKEGGKFGLELIACKIAKQC

SEQ ID NO: 2097 - protein, 19 aa, synthetic construct
  REGION 1..19: note = Synthetic
SAMERLNNWLKTFKHPPHH

SEQ ID NO: 2098 - protein, 21 aa, synthetic construct
  REGION 1..21: note = Synthetic
AGTVAKDVVKLVNDLRSCMSV

SEQ ID NO: 2099 - protein, 22 aa, synthetic construct
  REGION 1..22: note = Synthetic
KTLARWAQNAFSKLLRSRATKP

SEQ ID NO: 2100 - protein, 22 aa, synthetic construct
  REGION 1..22: note = Synthetic
KTLARWAQNAFSKLLRSRATKP

SEQ ID NO: 2101 - protein, 42 aa, synthetic construct
  REGION 1..42: note = Synthetic
KEGCRKFLGGCENTGQCCLHLFCKYDTPFNHFCAWDLSFGRK

SEQ ID NO: 2102 - protein, 17 aa, synthetic construct
  REGION 1..17: note = Synthetic
FLNKWITFCQSIYSTMT

SEQ ID NO: 2103 - protein, 25 aa, synthetic construct
  REGION 1..25: note = Synthetic
SKAVEQVKEAFSKLQEKGVYKAMNE

SEQ ID NO: 2104 - protein, 15 aa, synthetic construct
  REGION 1..15: note = Synthetic
CAQTIVKCIQNCVNP

SEQ ID NO: 2105 - protein, 22 aa, synthetic construct
  REGION 1..22: note = Synthetic
CKRCCSYAGEAMDKVTEVQPHN

SEQ ID NO: 2106 - protein, 19 aa, synthetic construct
  REGION 1..19: note = Synthetic
KAIKNLLKAVSKERSKRSP

SEQ ID NO: 2107 - protein, 32 aa, synthetic construct
  REGION 1..32: note = Synthetic
RGFLSTVKNLATNVAGTVIDTIKCKVTGGCRK

SEQ ID NO: 2108 - protein, 36 aa, synthetic construct
  REGION 1..36: note = Synthetic
TGIVNGIKSLVKGVGMKVFKAGLNNIGNTGCNEDEC

SEQ ID NO: 2109 - protein, 36 aa, synthetic construct
  REGION 1..36: note = Synthetic
TGIVNGIKSLVKGVGMKVFKAGLSNIGNTGCNEDEC

SEQ ID NO: 2110 - protein, 36 aa, synthetic construct; identical to SEQ ID NO: 2109
  REGION 1..36: note = Synthetic

SEQ ID NO: 2111 - protein, 20 aa, synthetic construct
  REGION 1..20: note = Synthetic
MAEQLMEKIKKLWYSRVQGY

SEQ ID NO: 2112 - protein, 24 aa, synthetic construct
  REGION 1..24: note = Synthetic
LLQEFQEILKEATELRFSGLPDTL

SEQ ID NO: 2113 - protein, 19 aa, synthetic construct
  REGION 1..19: note = Synthetic
RLQKCLHSIIKHLDHIQRC

SEQ ID NO: 2114 - protein, 42 aa, synthetic construct
  REGION 1..42: note = Synthetic
ITAAIQCAKRVVRDPQGIRAWVAWRTQCQNRDLSQYIRNCGV

SEQ ID NO: 2115 - protein, 34 aa, synthetic construct
  REGION 1..34: note = Synthetic
KKAVSSWYRAIDTLSQTIGIFRPRSLWNRSENNS

SEQ ID NO: 2116 - protein, 11 aa, synthetic construct
  REGION 1..11: note = Synthetic
LKTLQKLMENY

SEQ ID NO: 2117 - protein, 19 aa, synthetic construct
  REGION 1..19: note = Synthetic
KICRRCCSSAEEALNNKKN

SEQ ID NO: 2118 - protein, 34 aa, synthetic construct
  REGION 1..34: note = Synthetic
TCPKLIKSLVEIADQLDDDLDSTPQELCKFVYFC

SEQ ID NO: 2119 - protein, 33 aa, synthetic construct
  REGION 1..33: note = Synthetic
ASVRKICSRCVALKRHGVLIVLCSNPKHKQRQG

SEQ ID NO: 2120 - protein, 27 aa, synthetic construct
  REGION 1..27: note = Synthetic
KLFRVYANFLRGKLKLYTGEVCRRGDR

SEQ ID NO: 2121 - protein, 33 aa, synthetic construct
  REGION 1..33: note = Synthetic
FGKRGLKNLDQYNDLFDGEISDADIKYLQDLMR

SEQ ID NO: 2122 - protein, 38 aa, synthetic construct
  REGION 1..38: note = Synthetic
DNLHDYCTGISSDCPRNPYKGKYDPMKWPAAAKGSVLM

SEQ ID NO: 2123 - protein, 15 aa, synthetic construct
  REGION 1..15: note = Synthetic
ARSALENIASTVTKF

SEQ ID NO: 2124 - protein, 40 aa, synthetic construct
  REGION 1..40: note = Synthetic
YIKAAWQIGKHALGDMTDEEFQDFMKEVEQAREEELQSRQ

SEQ ID NO: 2125 - protein, 26 aa, synthetic construct
  REGION 1..26: note = Synthetic
HQCDECCKKAGDRAGNCVYYKCKCNP

SEQ ID NO: 2126 - protein, 14 aa, synthetic construct
  REGION 1..14: note = Synthetic
EKFKRIANSFLQKN

SEQ ID NO: 2127 - protein, 14 aa, synthetic construct
  REGION 1..14: note = Synthetic
EKFKRIANSFLQKN

SEQ ID NO: 2128 - protein, 14 aa, synthetic construct
  REGION 1..14: note = Synthetic
EKFKRIANSFLQKN

SEQ ID NO: 2129 - protein, 17 aa, synthetic construct
  REGION 1..17: note = Synthetic
FLNRWITFCQSIISTLT

SEQ ID NO: 2130 - protein, 17 aa, synthetic construct
  REGION 1..17: note = Synthetic
FLNRWITFCQSIISTLT

SEQ ID NO: 2131 - protein, 17 aa, synthetic construct
  REGION 1..17: note = Synthetic
FLNRWITFCQSIISTLT

SEQ ID NO: 2132 - protein, 17 aa, synthetic construct
  REGION 1..17: note = Synthetic
FLNRWITFCQSIISTLT

SEQ ID NO: 2133 - protein, 17 aa, synthetic construct
  REGION 1..17: note = Synthetic
FLNRWITFCQSIISTLT

SEQ ID NO: 2134 - protein, 17 aa, synthetic construct
  REGION 1..17: note = Synthetic
FLNRWITFCQSIISTLT

SEQ ID NO: 2135 - protein, 17 aa, synthetic construct
  REGION 1..17: note = Synthetic
FLNRWITFCQSIISTLT

SEQ ID NO: 2136 - protein, 17 aa, synthetic construct
  REGION 1..17: note = Synthetic
FLNRWITFCQSIISTLT

SEQ ID NO: 2137 - protein, 17 aa, synthetic construct
  REGION 1..17: note = Synthetic
FLNRWITFCQSIISTLT

SEQ ID NO: 2138 - protein, 42 aa, synthetic construct
  REGION 1..42: note = Synthetic
ITQAVACAKRVVRDPQGIKAWVAWRNKCQNRDLRSYVQGCRV

SEQ ID NO: 2139 - protein, 22 aa, synthetic construct
  REGION 1..22: note = Synthetic
VYQCMDRVPNFCQRRCSAIAAH

SEQ ID NO: 2140 - protein, 24 aa, synthetic construct
  REGION 1..24: note = Synthetic
VENCADACVSFCNGDAGLPSLDAY

SEQ ID NO: 2141 - protein, 20 aa, synthetic construct
  REGION 1..20: note = Synthetic
ATTFIEKLMTFIRKASRNAR

SEQ ID NO: 2142 - protein, 13 aa, synthetic construct
  REGION 1..13: note = Synthetic
KCMNKACKCYGCV

SEQ ID NO: 2143 - protein, 17 aa, synthetic construct
  REGION 1..17: note = Synthetic
FLNKWITFCQSIFSTLT

SEQ ID NO: 2144 - protein, 17 aa, synthetic construct
  REGION 1..17: note = Synthetic
FLNKWITFCQSIFSTLT

SEQ ID NO: 2145 - protein, 33 aa, synthetic construct
  REGION 1..33: note = Synthetic
LGKRGLKNADRLDELFDGDISDADLDFLRELMR

SEQ ID NO: 2146 - protein, 25 aa, synthetic construct
  REGION 1..25: note = Synthetic
SMLSVLKNLGKVGLGFVACKINKQC

SEQ ID NO: 2147 - protein, 30 aa, synthetic construct
  REGION 1..30: note = Synthetic
RGFMDTAKQVAKNVAVTLIDKLRCKVTGGC

SEQ ID NO: 2148 - protein, 32 aa, synthetic construct
  REGION 1..32: note = Synthetic
CKELGHRGGRCVDSPSKHCPGVLKNNKQCHCY

SEQ ID NO: 2149 - protein, 21 aa, synthetic construct
  REGION 1..21: note = Synthetic
KKAASVIQKILKDFGLNGGRE

SEQ ID NO: 2150 - protein, 21 aa, synthetic construct
  REGION 1..21: note = Synthetic
KKAASVIQKILKDFGLNGGRE

SEQ ID NO: 2151 - protein, 28 aa, synthetic construct
  REGION 1..28: note = Synthetic
DCYRRFEQGVAKGTQCWCIEKDVTYKGV

SEQ ID NO: 2152 - protein, 27 aa, synthetic construct
  REGION 1..27: note = Synthetic
LLDTIKGVAKTVAASMLDKLKCKISGC

SEQ ID NO: 2153 - protein, 13 aa, synthetic construct
  REGION 1..13: note = Synthetic
KCMNKVCKCYGCG

SEQ ID NO: 2154 - protein, 22 aa, synthetic construct
  REGION 1..22: note = Synthetic
VYSLADKIANALRYGGKNIILL

SEQ ID NO: 2155 - protein, 19 aa, synthetic construct
  REGION 1..19: note = Synthetic
KAIKNLLKAVSKERSKRSP

SEQ ID NO: 2156 - protein, 32 aa, synthetic construct
  REGION 1..32: note = Synthetic
IMSIVKDVAKTAAKEAAKGALSTLSCKLAKTC

SEQ ID NO: 2157 - protein, 15 aa, synthetic construct
  REGION 1..15: note = Synthetic
DFLHELTNFVRYLQK

SEQ ID NO: 2158 - protein, 16 aa, synthetic construct
  REGION 1..16: note = Synthetic
KTLQRVVRKIASDIDE

SEQ ID NO: 2159 - protein, 34 aa, synthetic construct
  REGION 1..34: note = Synthetic
NICGSVIRPLDCTRRKSRMGRFARTNCKKLCGFC

SEQ ID NO: 2160 - protein, 19 aa, synthetic construct
  REGION 1..19: note = Synthetic
KWVSEYMEILDQKSQILQP

SEQ ID NO: 2161 - protein, 34 aa, synthetic construct
  REGION 1..34: note = Synthetic
RVIKCIDHICQYARNLPDFASGISESTKMPCKGE

SEQ ID NO: 2162 - protein, 14 aa, synthetic construct
  REGION 1..14: note = Synthetic
YQRGCEKINRCRGG

SEQ ID NO: 2163 - protein, 23 aa, synthetic construct
  REGION 1..23: note = Synthetic
VEQCGDACVNFCNADAGLTSLDA

SEQ ID NO: 2164 - protein, 12 aa, synthetic construct
  REGION 1..12: note = Synthetic
FYGGYSGLGSSI

SEQ ID NO: 2165 - protein, 35 aa, synthetic construct
  REGION 1..35: note = Synthetic
WEDIVEGAKKIFEKCTEASSEVLGQAFAKDGWNVK

SEQ ID NO: 2166 - protein, 25 aa, synthetic construct
  REGION 1..25: note = Synthetic
SMLSVLKNLGKVGLGLVACKINKQC

SEQ ID NO: 2167 - protein, 17 aa, synthetic construct
  REGION 1..17: note = Synthetic
EELSQMANNCMQLANMM

SEQ ID NO: 2168 - protein, 17 aa, synthetic construct
  REGION 1..17: note = Synthetic
EELSQMANNCMQLANMM

SEQ ID NO: 2169 - protein, 17 aa, synthetic construct
  REGION 1..17: note = Synthetic
EELSQMANNCMQLANMM

SEQ ID NO: 2170 - protein, 17 aa, synthetic construct
  REGION 1..17: note = Synthetic
EELSQMANNCMQLANMM

SEQ ID NO: 2171 - protein, 14 aa, synthetic construct
  REGION 1..14: note = Synthetic
YSRGCSKIHRCRRD

SEQ ID NO: 2172 - protein, 14 aa, synthetic construct
  REGION 1..14: note = Synthetic
YSRGCSKIHRCRRD

SEQ ID NO: 2173 - protein, 14 aa, synthetic construct
  REGION 1..14: note = Synthetic
YSRGCSKIHRCRRD

SEQ ID NO: 2174 - protein, 22 aa, synthetic construct
  REGION 1..22: note = Synthetic
VYQCMDRVPNFCDRRCTAAAAH

SEQ ID NO: 2175 - protein, 19 aa, synthetic construct
  REGION 1..19: note = Synthetic
AWFSEAFGKVKEKLKTTFS

SEQ ID NO: 2176 - protein, 12 aa, synthetic construct
  REGION 1..12: note = Synthetic
FYGAYSGLGSSL

SEQ ID NO: 2177 - protein, 12 aa, synthetic construct
  REGION 1..12: note = Synthetic
FYGAYSGLGSSL

SEQ ID NO: 2178 - protein, 12 aa, synthetic construct
  REGION 1..12: note = Synthetic
FYGAYSGLGSSL

SEQ ID NO: 2179 - protein, 12 aa, synthetic construct
  REGION 1..12: note = Synthetic
FYGAYSGLGSSL

SEQ ID NO: 2180 - protein, 14 aa, synthetic construct
  REGION 1..14: note = Synthetic
KVIGVIGHLIHPPS

SEQ ID NO: 2181 - protein, 35 aa, synthetic construct
  REGION 1..35: note = Synthetic
DIESCLNECFRVYNTGFATCRGDKYSQLCTCEYNC

SEQ ID NO: 2182 - protein, 12 aa, synthetic construct
  REGION 1..12: note = Synthetic
IYGSYSGIGSSL

SEQ ID NO: 2183 - protein, 17 aa, synthetic construct
  REGION 1..17: note = Synthetic
EELSQMANNCMQLANMM

SEQ ID NO: 2184 - protein, 24 aa, synthetic construct
  REGION 1..24: note = Synthetic
RAAKDFLTTLLTILEWMNNKGCSH

SEQ ID NO: 2185 - protein, 32 aa, synthetic construct
  REGION 1..32: note = Synthetic
SILNPFRRVCNDWYNGFPGRRCTEAAGSGGNN

SEQ ID NO: 2186 - protein, 32 aa, synthetic construct
  REGION 1..32: note = Synthetic
IMDTLKNLAKTAGKGALQSLLNHASCKLSGQC

SEQ ID NO: 2187 - protein, 11 aa, synthetic construct
  REGION 1..11: note = Synthetic
TVLSYCHHIIS

SEQ ID NO: 2188 - protein, 32 aa, synthetic construct
  REGION 1..32: note = Synthetic
LISGLKNVGKEVGMDVVRTGIDIAGCKIKGEC

SEQ ID NO: 2189 - protein, 32 aa, synthetic construct; identical to SEQ ID NO: 2188
  REGION 1..32: note = Synthetic

SEQ ID NO: 2190 - protein, 16 aa, synthetic construct
  REGION 1..16: note = Synthetic
KVSNWWKRIWEKIKNK

SEQ ID NO: 2191 - protein, 16 aa, synthetic construct
  REGION 1..16: note = Synthetic
KVSNWWKRIWEKIKNK

SEQ ID NO: 2192 - protein, 32 aa, synthetic construct
  REGION 1..32: note = Synthetic
HSLLKILSTFLYQLFSSSLIVAVLTFIPFFIL

SEQ ID NO: 2193 - protein, 26 aa, synthetic construct
  REGION 1..26: note = Synthetic
GQCDECCKKAGERVGTCVYYKCKCNP

SEQ ID NO: 2194 - protein, 24 aa, synthetic construct
  REGION 1..24: note = Synthetic
EVLEIIHHFVEILDRYFGSVSVSL

SEQ ID NO: 2195 - protein, 27 aa, synthetic construct
  REGION 1..27: note = Synthetic
AGNALTFLKSLLEIFQKEKMRGMRGKI

SEQ ID NO: 2196 - protein, 24 aa, synthetic construct
  REGION 1..24: note = Synthetic
KKCATCCGGIGRCFGPQCLCNRGY

SEQ ID NO: 2197 - protein, 12 aa, synthetic construct
  REGION 1..12: note = Synthetic
IYGSYSGIGSAL

SEQ ID NO: 2198 - protein, 24 aa, synthetic construct
  REGION 1..24: note = Synthetic
VYHCMDRIANFCQRRCSPAAATAH

SEQ ID NO: 2199 - protein, 35 aa, synthetic construct
  REGION 1..35: note = Synthetic
LQNVTTCLERCIEVAQILKRISSRLDKRWTGNADN

SEQ ID NO: 2200 - protein, 17 aa, synthetic construct
  REGION 1..17: note = Synthetic
LKDFLESLKSIMQMDYS

SEQ ID NO: 2201 - protein, 32 aa, synthetic construct
  REGION 1..32: note = Synthetic
FGKRGLNDLSDLDELFDGEISEADVDFLREIM

SEQ ID NO: 2202 - protein, 15 aa, synthetic construct
  REGION 1..15: note = Synthetic
LEYIFKNIFQVASTF

SEQ ID NO: 2203 - protein, 19 aa, synthetic construct
  REGION 1..19: note = Synthetic
HKMKKLLRYLNYVAEHTAV

SEQ ID NO: 2204 - protein, 19 aa, synthetic construct
  REGION 1..19: note = Synthetic
LLASLGKVLGGYLAEKLKP

SEQ ID NO: 2205 - protein, 17 aa, synthetic construct
  REGION 1..17: note = Synthetic
GRKLYNEIRRWDHFLDN

SEQ ID NO: 2206 - protein, 23 aa, synthetic construct
  REGION 1..23: note = Synthetic
NFLNDIGKRGFHWAPSAKAAKFY

SEQ ID NO: 2207 - protein, 22 aa, synthetic construct
  REGION 1..22: note = Synthetic
VYQCMDRVPNFCQRRCSAIAAH

SEQ ID NO: 2208 - protein, 41 aa, synthetic construct
  REGION 1..41: note = Synthetic
SKAVEQVKRVFNMLQERGVYKAMSEFDIFINYIESYMTTKM

SEQ ID NO: 2209 - protein, 22 aa, synthetic construct
  REGION 1..22: note = Synthetic
LKKATRVVYKAASAAAREMNRN

SEQ ID NO: 2210 - protein, 22 aa, synthetic construct
  REGION 1..22: note = Synthetic
VYQCMDRVPNFCQRRCSAIAAH

SEQ ID NO: 2211 - protein, 37 aa, synthetic construct
  REGION 1..37: note = Synthetic
RDCRKMFGGCSKHEDCCAHLACKRTFNYCAWDGSFSK

SEQ ID NO: 2212 - protein, 29 aa, synthetic construct
  REGION 1..29: note = Synthetic
LIRFGRSAAAPLIRFGRASSAPLIRFGRK

SEQ ID NO: 2213 - protein, 19 aa, synthetic construct
  REGION 1..19: note = Synthetic
EFLRRWIAICQSIISTMTQ

SEQ ID NO: 2214 - protein, 31 aa, synthetic construct
  REGION 1..31: note = Synthetic
NPAEKWVQRLMRLVDVQNMKQMTEGRIGDSL

SEQ ID NO: 2215 - protein, 20 aa, synthetic construct
  REGION 1..20: note = Synthetic
IASVAANVFSKIFCAISKKC

SEQ ID NO: 2216 - protein, 19 aa, synthetic construct
  REGION 1..19: note = Synthetic
KAFSLADSILTGTSKVIVL

SEQ ID NO: 2217 - protein, 17 aa, synthetic construct
  REGION 1..17: note = Synthetic
ILGDWSNAISALYCRCS

SEQ ID NO: 2218 - protein, 18 aa, synthetic construct
  REGION 1..18: note = Synthetic
KFLSEIIDTCNERLDKIL

SEQ ID NO: 2219 - protein, 23 aa, synthetic construct
  REGION 1..23: note = Synthetic
FLKRLLQEIKTCWNKILSGTKEH

SEQ ID NO: 2220 - protein, 12 aa, synthetic construct
  REGION 1..12: note = Synthetic
IYGSYSGLGSSL

SEQ ID NO: 2221 - protein, 12 aa, synthetic construct
  REGION 1..12: note = Synthetic
IYGSYSGLGSSL

SEQ ID NO: 2222 - protein, 12 aa, synthetic construct
  REGION 1..12: note = Synthetic
IYGSYSGLGSSL

SEQ ID NO: 2223 - protein, 25 aa, synthetic construct
  REGION 1..25: note = Synthetic
YFHSFLDTFSKYLGSTSCPLLRLSR

SEQ ID NO: 2224 - protein, 17 aa, synthetic construct
  REGION 1..17: note = Synthetic
TLLKILSTFLYQLFSSS

SEQ ID NO: 2225 - protein, 35 aa, synthetic construct
  REGION 1..35: note = Synthetic
CSEAAYMINDLAETLGNNNEGDSLFKMTVRWKSFL

SEQ ID NO: 2226 - protein, 19 aa, synthetic construct
  REGION 1..19: note = Synthetic
KEFLNKWITFCQSILSTLA

SEQ ID NO: 2227 - protein, 26 aa, synthetic construct
  REGION 1..26: note = Synthetic
GLWNKIKEAASKAAGKAALGFVNEMV

SEQ ID NO: 2228 - protein, 36 aa, synthetic construct
  REGION 1..36: note = Synthetic
ALIKGAIHGGRFIHGMIQNHHGYDEQQELNKRAVDE

SEQ ID NO: 2229 - protein, 12 aa, synthetic construct
  REGION 1..12: note = Synthetic
FYGAYHGLGSSL

SEQ ID NO: 2230 - protein, 12 aa, synthetic construct
  REGION 1..12: note = Synthetic
LYGAYSGLGSSL

SEQ ID NO: 2231 - protein, 42 aa, synthetic construct
  REGION 1..42: note = Synthetic
ITEAVRCAKRIVSDGDGMNAWVAWRNRCRGTDVSKWIRGCRL

SEQ ID NO: 2232 - protein, 12 aa, synthetic construct
  REGION 1..12: note = Synthetic
FYGSYSGLGSSL

SEQ ID NO: 2233 - protein, 12 aa, synthetic construct
  REGION 1..12: note = Synthetic
FYGSYSGLGSSL

SEQ ID NO: 2234 - protein, 12 aa, synthetic construct
  REGION 1..12: note = Synthetic
FYGSYSGLGSSL

SEQ ID NO: 2235 - protein, 12 aa, synthetic construct
  REGION 1..12: note = Synthetic
FYGSYSGLGSSL

SEQ ID NO: 2236 - protein, 12 aa, synthetic construct
  REGION 1..12: note = Synthetic
FYGSYSGLGSSL

SEQ ID NO: 2237 - protein, 12 aa, synthetic construct
  REGION 1..12: note = Synthetic
FYGSYSGLGSSL

SEQ ID NO: 2238 - protein, 12 aa, synthetic construct
  REGION 1..12: note = Synthetic
FYGSYSGLGSSL

SEQ ID NO: 2239 - protein, 12 aa, synthetic construct
  REGION 1..12: note = Synthetic
FYGSYSGLGSSL

SEQ ID NO: 2240 - protein, 23 aa, synthetic construct
  REGION 1..23: note = Synthetic
FSQARSCCSRLGRCCHVGKGYSG

SEQ ID NO: 2241 - protein, 23 aa, synthetic construct
  REGION 1..23: note = Synthetic
FSQARSCCSRLGRCCHVGKGYSG

SEQ ID NO: 2242 - protein, 23 aa, synthetic construct
  REGION 1..23: note = Synthetic
FSQARSCCSRLGRCCHVGKGYSG

SEQ ID NO: 2243 - protein, 23 aa, synthetic construct
  REGION 1..23: note = Synthetic
FSQARSCCSRLGRCCHVGKGYSG

SEQ ID NO: 2244 - protein, 23 aa, synthetic construct
  REGION 1..23: note = Synthetic
FSQARSCCSRLGRCCHVGKGYSG

SEQ ID NO: 2245 - protein, 23 aa, synthetic construct
  REGION 1..23: note = Synthetic
FSQARSCCSRLGRCCHVGKGYSG

SEQ ID NO: 2246 - protein, 23 aa, synthetic construct
  REGION 1..23: note = Synthetic
FSQARSCCSRLGRCCHVGKGYSG

SEQ ID NO: 2247 - protein, 23 aa, synthetic construct
  REGION 1..23: note = Synthetic
FSQARSCCSRLGRCCHVGKGYSG

SEQ ID NO: 2248 - protein, 23 aa, synthetic construct
  REGION 1..23: note = Synthetic
FSQARSCCSRLGRCCHVGKGYSG

SEQ ID NO: 2249 - protein, 23 aa, synthetic construct
  REGION 1..23: note = Synthetic
FSQARSCCSRLGRCCHVGKGYSG

SEQ ID NO: 2250 - protein, 23 aa, synthetic construct
  REGION 1..23: note = Synthetic
FSQARSCCSRLGRCCHVGKGYSG

SEQ ID NO: 2251 - protein, 23 aa, synthetic construct
  REGION 1..23: note = Synthetic
FSQARSCCSRLGRCCHVGKGYSG

SEQ ID NO: 2252 - protein, 23 aa, synthetic construct
  REGION 1..23: note = Synthetic
FSQARSCCSRLGRCCHVGKGYSG

SEQ ID NO: 2253 - protein, 23 aa, synthetic construct
  REGION 1..23: note = Synthetic
FSQARSCCSRLGRCCHVGKGYSG

SEQ ID NO: 2254 - protein, 23 aa, synthetic construct
  REGION 1..23: note = Synthetic
FSQARSCCSRLGRCCHVGKGYSG

SEQ ID NO: 2255 - protein, 23 aa, synthetic construct
  REGION 1..23: note = Synthetic
FSQARSCCSRLGRCCHVGKGYSG

SEQ ID NO: 2256 - protein, 23 aa, synthetic construct
  REGION 1..23: note = Synthetic
FSQARSCCSRLGRCCHVGKGYSG

SEQ ID NO: 2257 - protein, 23 aa, synthetic construct
  REGION 1..23: note = Synthetic
FSQARSCCSRLGRCCHVGKGYSG

SEQ ID NO: 2258 - protein, 23 aa, synthetic construct
  REGION 1..23: note = Synthetic
FSQARSCCSRLGRCCHVGKGYSG

SEQ ID NO: 2259 - protein, 40 aa, synthetic construct
  REGION 1..40: note = Synthetic
TWVRDVVRSMDRKSNTRNNMIQTKPTGTQQSTNTAVTLTG

SEQ ID NO: 2260 - protein, 42 aa, synthetic construct
  REGION 1..42: note = Synthetic
IADAVACAKRVVRDPQGIRAWVAWRNRCQNRDVRQYVQGCGV

SEQ ID NO: 2261 - protein, 42 aa, synthetic construct; identical to SEQ ID NO: 2260
  REGION 1..42: note = Synthetic

SEQ ID NO: 2262 - protein, 42 aa, synthetic construct
  REGION 1..42: note = Synthetic
IADAVACAKRVVRDPQGIRAWVAWRNRCQNRDLRQYIQGCGV

SEQ ID NO: 2263 - protein, 42 aa, synthetic construct; identical to SEQ ID NO: 2260
  REGION 1..42: note = Synthetic

SEQ ID NO: 2264 - protein, 42 aa, synthetic construct; identical to SEQ ID NO: 2260
  REGION 1..42: note = Synthetic

SEQ ID NO: 2265 - protein, 42 aa, synthetic construct; identical to SEQ ID NO: 2260
  REGION 1..42: note = Synthetic

SEQ ID NO: 2266 - protein, 34 aa, synthetic construct
  REGION 1..34: note = Synthetic
LLRQVNSLADNVVKPEEGIDINAVHGLDTRSPET

SEQ ID NO: 2267 - protein, 34 aa, synthetic construct
  REGION 1..34: note = Synthetic
LADTLAKLAKNIATDRASAGKPSRAVSFVGKTRV

SEQ ID NO: 2268 - protein, 20 aa, synthetic construct
  REGION 1..20: note = Synthetic
RGCSRCCSYVGEAVQTQPGH

SEQ ID NO: 2269 - protein, 33 aa, synthetic construct; identical to SEQ ID NO: 1815
  REGION 1..33: note = Synthetic

SEQ ID NO: 2270 - protein, 32 aa, synthetic construct
  REGION 1..32: note = Synthetic
KGKELLRDYANRVLSPEEEAAAPAPVPAKRRR

SEQ ID NO: 2271 - protein, 12 aa, synthetic construct
  REGION 1..12: note = Synthetic
GKAVLNAASEAL

SEQ ID NO: 2272 - protein, 22 aa, synthetic construct
  REGION 1..22: note = Synthetic
NQFLDYLQEFLGVMNTEWIIES

SEQ ID NO: 2273 - protein, 25 aa, synthetic construct
  REGION 1..25: note = Synthetic
VLDTVTKAIETFAKVDANEARPKSQ

SEQ ID NO: 2274 - protein, 12 aa, synthetic construct
  REGION 1..12: note = Synthetic
GVPRVMSDAGRR

SEQ ID NO: 2275 - protein, 21 aa, synthetic construct
  REGION 1..21: note = Synthetic
VEKLTKALSTIRQCIISKIKK

SEQ ID NO: 2276 - protein, 16 aa, synthetic construct
  REGION 1..16: note = Synthetic
EDIFEEANRIATDLRQ

SEQ ID NO: 2277 - protein, 19 aa, synthetic construct
  REGION 1..19: note = Synthetic
KTIKSLVKAISKKRSRRSP

SEQ ID NO: 2278 - protein, 32 aa, synthetic construct; identical to SEQ ID NO: 2188
  REGION 1..32: note = Synthetic

SEQ ID NO: 2279 - protein, 32 aa, synthetic construct; identical to SEQ ID NO: 2188
  REGION 1..32: note = Synthetic

SEQ ID NO: 2280 - protein, 32 aa, synthetic construct; identical to SEQ ID NO: 2188
  REGION 1..32: note = Synthetic

SEQ ID NO: 2281 - protein, 32 aa, synthetic construct; identical to SEQ ID NO: 2188
  REGION 1..32: note = Synthetic

SEQ ID NO: 2282 - protein, 42 aa, synthetic construct
  REGION 1..42: note = Synthetic
CIKSLAADISDINYGVAAGLPGQCNVHIPYKISPSIDCKRVK

SEQ ID NO: 2283 - protein, 19 aa, synthetic construct
  REGION 1..19: note = Synthetic
KWVQKVVQAFLKRAEKQDP

SEQ ID NO: 2284 - protein, 13 aa, synthetic construct
  REGION 1..13: note = Synthetic
AVKKLLEALSHLV

SEQ ID NO: 2285 - protein, 27 aa, synthetic construct
  REGION 1..27: note = Synthetic
KLFRIYSNFLRGKLTLYTGEACRRGDR

SEQ ID NO: 2286 - protein, 36 aa, synthetic construct
  REGION 1..36: note = Synthetic
RDCAGYMRECKEKLRCSGYVCSSRWKWCVLPAPWRR

SEQ ID NO: 2287 - protein, 16 aa, synthetic construct
  REGION 1..16: note = Synthetic
KISDWWKRIWEKIKNK

SEQ ID NO: 2288 - protein, 18 aa, synthetic construct
  REGION 1..18: note = Synthetic
LQRFLELAYRVLRYLAKP

SEQ ID NO: 2289 - protein, 30 aa, synthetic construct
  REGION 1..30: note = Synthetic
TLNSFAQRLVRQWSSEGARLGLTYKEDKKR

SEQ ID NO: 2290 - protein, 25 aa, synthetic construct
  REGION 1..25: note = Synthetic
DMAQQCRDCCGGNGKCFGYQCLCNR

SEQ ID NO: 2291 - protein, 19 aa, synthetic construct
  REGION 1..19: note = Synthetic
KRMEYIAKKLDKMMEYESS

SEQ ID NO: 2292 - protein, 19 aa, synthetic construct
  REGION 1..19: note = Synthetic
NLINDGSTYFDRKKRFMSQ

SEQ ID NO: 2293 - protein, 17 aa, synthetic construct
  REGION 1..17: note = Synthetic
VQRVVEKFVKRAENQNP

SEQ ID NO: 2294 - protein, 17 aa, synthetic construct
  REGION 1..17: note = Synthetic
VQRVVEKFVKRAENQNP

SEQ ID NO: 2295 - protein, 37 aa, synthetic construct
  REGION 1..37: note = Synthetic
RKAIHELIQVMAELSPAAKTGKRKRSQMLFRGRRASQ

SEQ ID NO: 2296 - protein, 28 aa, synthetic construct
  REGION 1..28: note = Synthetic
LRNFLSDFDSLAQNVYKEYVHSMSGWID

SEQ ID NO: 2297 - protein, 18 aa, synthetic construct
  REGION 1..18: note = Synthetic
LQSFLELVHRVLRHLAQP

SEQ ID NO: 2298 - protein, 14 aa, synthetic construct
  REGION 1..14: note = Synthetic
EAVKKLLEALSHLV

SEQ ID NO: 2299 - protein, 14 aa, synthetic construct
  REGION 1..14: note = Synthetic
EAVKKLLEALSHLV

SEQ ID NO: 2300 - protein, 14 aa, synthetic construct
  REGION 1..14: note = Synthetic
EAVKKLLEALSHLV

SEQ ID NO: 2301 - protein, 14 aa, synthetic construct
  REGION 1..14: note = Synthetic
EAVKKLLEALSHLV

SEQ ID NO: 2302 - protein, 14 aa, synthetic construct
  REGION 1..14: note = Synthetic
EAVKKLLEALSHLV

SEQ ID NO: 2303 - protein, 14 aa, synthetic construct
  REGION 1..14: note = Synthetic
EAVKKLLEALSHLV

SEQ ID NO: 2304 - protein, 19 aa, synthetic construct
  REGION 1..19: note = Synthetic
KAIKNLLKAVSEKKSKRPP

SEQ ID NO: 2305 - protein, 17 aa, synthetic construct
  REGION 1..17: note = Synthetic
FLNTWITFCQSIISKLA

SEQ ID NO: 2306 - protein, 22 aa, synthetic construct
  REGION 1..22: note = Synthetic
DNVASAWNQAFDNIYEIIFRIV

SEQ ID NO: 2307 - protein, 23 aa, synthetic construct
  REGION 1..23: note = Synthetic
RGYNGCSRCCSYAGEAVQTQPGH

SEQ ID NO: 2308 - protein, 17 aa, synthetic construct
  REGION 1..17: note = Synthetic
FLNKWITFCQRIYSTMT

SEQ ID NO: 2309 - protein, 42 aa, synthetic construct
  REGION 1..42: note = Synthetic
RYGSDCAEPCKRLKCLLPSKCINGKCTCYPSIKIKNCKVQTY

SEQ ID NO: 2310 - protein, 34 aa, synthetic construct
  REGION 1..34: note = Synthetic
HNVISGLSEIAKSMSATAKPTKDRCAAYPYPDCP

SEQ ID NO: 2311 - protein, 11 aa, synthetic construct
  REGION 1..11: note = Synthetic
YDIIGNILKNF

SEQ ID NO: 2312 - protein, 28 aa, synthetic construct
  REGION 1..28: note = Synthetic
ITTCLTQLSEALTKGQPALIIAPMFRVG

SEQ ID NO: 2313 - protein, 12 aa, synthetic construct
  REGION 1..12: note = Synthetic
DNGKHWYDTGDQ

SEQ ID NO: 2314 - protein, 27 aa, synthetic construct
  REGION 1..27: note = Synthetic
FADCFYDAFSKIVDLKITIGTQWLIRS

SEQ ID NO: 2315 - protein, 35 aa, synthetic construct
  REGION 1..35: note = Synthetic
GLFRFARGYVEARTMWFDQKSGDATVEYSCYVLHY

SEQ ID NO: 2316 - protein, 22 aa, synthetic construct
  REGION 1..22: note = Synthetic
NQFLDYLQEFLGVMNTEWIIES

SEQ ID NO: 2317 - protein, 16 aa, synthetic construct
  REGION 1..16: note = Synthetic
LNKWITFCQRIFSTLT

SEQ ID NO: 2318 - protein, 13 aa, synthetic construct
  REGION 1..13: note = Synthetic
YSRGCSAITRCRS

SEQ ID NO: 2319 - protein, 11 aa, synthetic construct
  REGION 1..11: note = Synthetic
WRALDTLFENY

SEQ ID NO: 2320 - protein, 40 aa, synthetic construct
  REGION 1..40: note = Synthetic
VGNFVHGFSHVFGDDQQDNGKFYGYYAEDNGKHWYDTGDQ

SEQ ID NO: 2321 - protein, 42 aa, synthetic construct
  REGION 1..42: note = Synthetic
KAVEQVKSAFSKLQEKGVYKAMSEFDIFINYIETYMTMRMKI

SEQ ID NO: 2322 - protein, 12 aa, synthetic construct
  REGION 1..12: note = Synthetic
CGWVNRAWRGLV

SEQ ID NO: 2323 - protein, 16 aa, synthetic construct
  REGION 1..16: note = Synthetic
LNKWITFCQRIFSTLT

SEQ ID NO: 2324 - protein, 14 aa, synthetic construct
  REGION 1..14: note = Synthetic
HYGKKALQKASEKL

SEQ ID NO: 2325 - protein, 14 aa, synthetic construct
  REGION 1..14: note = Synthetic
HYGKKALQKASEKL

SEQ ID NO: 2326 - protein, 14 aa, synthetic construct
  REGION 1..14: note = Synthetic
HYGKKALQKASEKL

SEQ ID NO: 2327 - protein, 11 aa, synthetic construct
  REGION 1..11: note = Synthetic
INAISAIANHF

SEQ ID NO: 2328 - protein, 26 aa, synthetic construct
  REGION 1..26: note = Synthetic
DMAQQCRACCKGRGKCFGPQCLCGYD

SEQ ID NO: 2329 - protein, 15 aa, synthetic construct
  REGION 1..15: note = Synthetic
VQRIVQKILNKGKAN

SEQ ID NO: 2330 - protein, 37 aa, synthetic construct
  REGION 1..37: note = Synthetic
NCAKKIASGGNGMNAWVAWRNRCKGTDVHAWIRGCRL

SEQ ID NO: 2331 - protein, 14 aa, synthetic construct
  REGION 1..14: note = Synthetic
KALKALLGALTVFG

SEQ ID NO: 2332 - protein, 15 aa, synthetic construct
  REGION 1..15: note = Synthetic
ASKAFKDMVKAAHTD

SEQ ID NO: 2333 - protein, 34 aa, synthetic construct
  REGION 1..34: note = Synthetic
RACKGVFDACTPGKNECCPNRVCSDKHKWCKWKL

SEQ ID NO: 2334 - protein, 34 aa, synthetic construct
  REGION 1..34: note = Synthetic
KVEDALHTGAQAGFKLIRPVERGATPKKSEKPEK

SEQ ID NO: 2335 - protein, 11 aa, synthetic construct
  REGION 1..11: note = Synthetic
YASYGDSYDGI

SEQ ID NO: 2336 - protein, 22 aa, synthetic construct
  REGION 1..22: note = Synthetic
LTTLNDFLGRLRGIMQMKNWQG

SEQ ID NO: 2337 - protein, 42 aa, synthetic construct
  REGION 1..42: note = Synthetic
ITAAIQCAKRVVRDPQGIRAWVAWRAHCQNRDLSQYIRNCGV

SEQ ID NO: 2338 - protein, 28 aa, synthetic construct
  REGION 1..28: note = Synthetic
QYWTECCGRIGPHCSRCICPEVVCPKNG

SEQ ID NO: 2339 - protein, 20 aa, synthetic construct
  REGION 1..20: note = Synthetic
IRSLAHRWQTIIDQHGSYFQ

SEQ ID NO: 2340 - protein, 27 aa, synthetic construct
  REGION 1..27: note = Synthetic
SQCYKTCEKVVGVAAGKCMNGKCICYP

SEQ ID NO: 2341 - protein, 30 aa, synthetic construct
  REGION 1..30: note = Synthetic
FLSTVKNLATNVAGTVLDTIRCKVTGGCRP

SEQ ID NO: 2342 - protein, 18 aa, synthetic construct
  REGION 1..18: note = Synthetic
GGNCDGVMRQCKCIRQCW

SEQ ID NO: 2343 - protein, 14 aa, synthetic construct
  REGION 1..14: note = Synthetic
HYGKKALQKASEKL

SEQ ID NO: 2344 - protein, 14 aa, synthetic construct
  REGION 1..14: note = Synthetic
HYGKKALQKASEKL

SEQ ID NO: 2345 - protein, 21 aa, synthetic construct
  REGION 1..21: note = Synthetic
KAVEFLNKWITFCQSIYSTMT

SEQ ID NO: 2346 - protein, 23 aa, synthetic construct
  REGION 1..23: note = Synthetic
FSQARSCCSRLGRCCHVGKGYSG

SEQ ID NO: 2347 - protein, 35 aa, synthetic construct
  REGION 1..35: note = Synthetic
DLQSIVSQLLTRVNDNNSEAQHVRKQIFSRKFWKR

SEQ ID NO: 2348 - protein, 17 aa, synthetic construct
  REGION 1..17: note = Synthetic
MKKLLRYLNYVAEHTAV

SEQ ID NO: 2349 - protein, 17 aa, synthetic construct
  REGION 1..17: note = Synthetic
MKKLLRYLNYVAEHTAV

SEQ ID NO: 2350 - protein, 17 aa, synthetic construct
  REGION 1..17: note = Synthetic
MKKLLRYLNYVAEHTAV

SEQ ID NO: 2351 - protein, 17 aa, synthetic construct
  REGION 1..17: note = Synthetic
MKKLLRYLNYVAEHTAV

SEQ ID NO: 2352 - protein, 31 aa, synthetic construct
  REGION 1..31: note = Synthetic
EEVFKKFKKVAKSFGVPGKNLIMLSRSEPCS

SEQ ID NO: 2353 - protein, 22 aa, synthetic construct
  REGION 1..22: note = Synthetic
CARYYGNYFDYWGQGTTLTVSS

SEQ ID NO: 2354 - protein, 16 aa, synthetic construct
  REGION 1..16: note = Synthetic
SFVTRVLTTLTTIVDL

SEQ ID NO: 2355 - protein, 15 aa, synthetic construct
  REGION 1..15: note = Synthetic
VTKIATTVDQALSTS

SEQ ID NO: 2356 - protein, 32 aa, synthetic construct
  REGION 1..32: note = Synthetic
WFTMLKKLGTMALHAGKAALGAAANTISQGTQ

SEQ ID NO: 2357 - protein, 26 aa, synthetic construct
  REGION 1..26: note = Synthetic
GQCDDCCKKAGDRAGTCVYYKCKCNP

SEQ ID NO: 2358 - protein, 20 aa, synthetic construct
  REGION 1..20: note = Synthetic
ARSCCTRLGRCCHVAKGYSG

SEQ ID NO: 2359 - protein, 20 aa, synthetic construct
  REGION 1..20: note = Synthetic
ARSCCTRLGRCCHVAKGYSG

SEQ ID NO: 2360 - protein, 36 aa, synthetic construct
  REGION 1..36: note = Synthetic
SDASEIVNGASEQCAKGCSIFCTKSYVVPPGPPKLL

SEQ ID NO: 2361 - protein, 19 aa, synthetic construct
  REGION 1..19: note = Synthetic
VERVSACVDSCSNKCTKKN

SEQ ID NO: 2362 - protein, 24 aa, synthetic construct
  REGION 1..24: note = Synthetic
EDFETLLQQVARHARSECLFIFSG

SEQ ID NO: 2363 - protein, 42 aa, synthetic construct
  REGION 1..42: note = Synthetic
KAVEQVRGVFSKLQEKGVYKAMSEFDIFINYIEAYMTMKMKN

SEQ ID NO: 2364 - protein, 36 aa, synthetic construct
  REGION 1..36: note = Synthetic
ECDKAVATCFRDNLDTYKKRNIFHPTSSCVKVSTPC

SEQ ID NO: 2365 - protein, 36 aa, synthetic construct
  REGION 1..36: note = Synthetic
ECDKAVATCFRDNLDTYKKRNIFHPKSSCVKVSTPC

SEQ ID NO: 2366 - protein, 17 aa, synthetic construct
  REGION 1..17: note = Synthetic
LMDQLDEYANAVQIVGK

SEQ ID NO: 2367 - protein, 19 aa, synthetic construct
  REGION 1..19: note = Synthetic
NIQKCCSNGCGHVCKSPVF

SEQ ID NO: 2368 - protein, 23 aa, synthetic construct
  REGION 1..23: note = Synthetic
FLKRLLQEIKTCWNKILMGTKEH

SEQ ID NO: 2369 - protein, 26 aa, synthetic construct
  REGION 1..26: note = Synthetic
VGHCYGQFKDAKRCLCSVCGPDRQPP

SEQ ID NO: 2370 - protein, 23 aa, synthetic construct
  REGION 1..23: note = Synthetic
LPAIVGAAGKFLPKIFCAISKKC

SEQ ID NO: 2371 - protein, 29 aa, synthetic construct
  REGION 1..29: note = Synthetic
QEFLERMKSLLQKVSCFVLSLPIQIAFYI

SEQ ID NO: 2372 - protein, 22 aa, synthetic construct
  REGION 1..22: note = Synthetic
RHFLDYLQEFLGVMSTEWAMEV

SEQ ID NO: 2373 - protein, 20 aa, synthetic construct
  REGION 1..20: note = Synthetic
LAEQLMEKIKNLWYTKVQGY

SEQ ID NO: 2374 - protein, 20 aa, synthetic construct
  REGION 1..20: note = Synthetic
VAGVAGQVLKKIYCTISKKC

SEQ ID NO: 2375 - protein, 28 aa, synthetic construct
  REGION 1..28: note = Synthetic
KKLVEVMKDVASVCEMVRKKARMALKEY

SEQ ID NO: 2376 - protein, 35 aa, synthetic construct
  REGION 1..35: note = Synthetic
DLQSMVSQLLTRVNENNSDALHVRKQMFSRKFWKR

SEQ ID NO: 2377 - protein, 31 aa, synthetic construct
  REGION 1..31: note = Synthetic
DILDKMENAIHKAAQAGIGIAKPIEKMILPK

SEQ ID NO: 2378 - protein, 34 aa, synthetic construct
  REGION 1..34: note = Synthetic
DILDKMENAIHKAAQAGIGIAKPIENMILPKLTK

SEQ ID NO: 2379 - protein, 31 aa, synthetic construct; identical to SEQ ID NO: 2377
  REGION 1..31: note = Synthetic

SEQ ID NO: 2380 - protein, 34 aa, synthetic construct; identical to SEQ ID NO: 2378
  REGION 1..34: note = Synthetic

SEQ ID NO: 2381 - protein, 19 aa, synthetic construct
  REGION 1..19: note = Synthetic
FEQLIEKIKNLWYTRVLGY

SEQ ID NO: 2382 - protein, 20 aa, synthetic construct
  REGION 1..20: note = Synthetic
WAKYHAAVRHYVNLITRQRY

SEQ ID NO: 2383 - protein, 31 aa, synthetic construct
  REGION 1..31: note = Synthetic
AKSFVSTLGRAMENNPDDHHLYNDKDVPLDY

SEQ ID NO: 2384 - protein, 12 aa, synthetic construct
  REGION 1..12: note = Synthetic
FYGSYTGLGSSL

SEQ ID NO: 2385 - protein, 15 aa, synthetic construct
  REGION 1..15: note = Synthetic
DFLQQLTNLLRSMHK

SEQ ID NO: 2386 - protein, 21 aa, synthetic construct
  REGION 1..21: note = Synthetic
KAAEFLNKWITFCQSIYSTMT

SEQ ID NO: 2387 - protein, 33 aa, synthetic construct
  REGION 1..33: note = Synthetic
VKEAANVLESAWQMWHVNGTRCPKGVFPYDATQ

SEQ ID NO: 2388 - protein, 38 aa, synthetic construct
  REGION 1..38: note = Synthetic
QSLRRGCKRVPAQATAPFPDCCPTTLCRGRQWDRPRTL

SEQ ID NO: 2389 - protein, 31 aa, synthetic construct
  REGION 1..31: note = Synthetic
DSLYEPGKALASACQVAVEACAAWFPGPEKK

SEQ ID NO: 2390 - protein, 18 aa, synthetic construct
  REGION 1..18: note = Synthetic
KLVDSLLQVLKGKEGTAS

SEQ ID NO: 2391 - protein, 19 aa, synthetic construct
  REGION 1..19: note = Synthetic
EAIGKAAGKCMNGKCKCYP

SEQ ID NO: 2392 - protein, 28 aa, synthetic construct
  REGION 1..28: note = Synthetic
EQYSSLMEGLAGDLLQWMLHATRRERPQ

SEQ ID NO: 2393 - protein, 11 aa, synthetic construct
  REGION 1..11: note = Synthetic
INAISAIANHL

SEQ ID NO: 2394 - protein, 17 aa, synthetic construct
  REGION 1..17: note = Synthetic
FRRLCRNIKEVIKKNCY

SEQ ID NO: 2395 - protein, 36 aa, synthetic construct
  REGION 1..36: note = Synthetic
ECDRVAAECLRRSLSTYKYGYMFYPDSRCRGPSETC

SEQ ID NO: 2396 - protein, 36 aa, synthetic construct
  REGION 1..36: note = Synthetic
ECDRVAAECLRRSLSTYKNEYMFYPDSRCREPSETC

SEQ ID NO: 2397 - protein, 36 aa, synthetic construct; identical to SEQ ID NO: 2395
  REGION 1..36: note = Synthetic

SEQ ID NO: 2398 - protein, 17 aa, synthetic construct
  REGION 1..17: note = Synthetic
RDWDRVAERCPTAATWW

SEQ ID NO: 2399 - protein, 34 aa, synthetic construct
  REGION 1..34: note = Synthetic
NKLERVFRSLAYRVELLEANTEPMTEKKSVSVSE

SEQ ID NO: 2400 - protein, 21 aa, synthetic construct
  REGION 1..21: note = Synthetic
DDMNDYCTGISSDCPRNPWKD

SEQ ID NO: 2401 - protein, 20 aa, synthetic construct
  REGION 1..20: note = Synthetic
ARSCCTRLGRCCHVAKGYSG

SEQ ID NO: 2402 - protein, 33 aa, synthetic construct
  REGION 1..33: note = Synthetic
FGKRGLSDLDGLDELFDGEISKADRDFLRELMR

SEQ ID NO: 2403 - protein, 23 aa, synthetic construct
  REGION 1..23: note = Synthetic
EVANPVKGFFESPPTVGHNLVAD

SEQ ID NO: 2404 - protein, 20 aa, synthetic construct
  REGION 1..20: note = Synthetic
WAKYHAAVRHYVNLITRQRY

SEQ ID NO: 2405 - protein, 19 aa, synthetic construct
  REGION 1..19: note = Synthetic
SAMERLNNWLNTFKHQPHH

SEQ ID NO: 2406 - protein, 21 aa, synthetic construct
  REGION 1..21: note = Synthetic
KAVEFLNKWITFCQSIYSTMT

SEQ ID NO: 2407 - protein, 21 aa, synthetic construct
  REGION 1..21: note = Synthetic
KAVEFLNKWITFCQSIYSTLT

SEQ ID NO: 2408 - protein, 12 aa, synthetic construct
  REGION 1..12: note = Synthetic
DNGKHWYDTGDQ

SEQ ID NO: 2409 - protein, 40 aa, synthetic construct
  REGION 1..40: note = Synthetic
YYDTFTKLCNTFQHTGCGGNSNHFKEWNDCFFTCGSGFEW

SEQ ID NO: 2410 - protein, 11 aa, synthetic construct
  REGION 1..11: note = Synthetic
TCVSSIVRHAS

SEQ ID NO: 2411 - protein, 12 aa, synthetic construct
  REGION 1..12: note = Synthetic
FFHRISHFLESA

SEQ ID NO: 2412 - protein, 24 aa, synthetic construct
  REGION 1..24: note = Synthetic
LFNDLEHVCDDCYNLYRTSYVASA

SEQ ID NO: 2413 - protein, 24 aa, synthetic construct
  REGION 1..24: note = Synthetic
YKSGARIGRNCFCLLKGVIYKREN

SEQ ID NO: 2414 - protein, 27 aa, synthetic construct
  REGION 1..27: note = Synthetic
DLTRALHDLVKALKKAYRTLDIAAVEH

SEQ ID NO: 2415 - protein, 20 aa, synthetic construct
  REGION 1..20: note = Synthetic
LDHMHDLLSTLQKLKFANNK

SEQ ID NO: 2416 - protein, 19 aa, synthetic construct
  REGION 1..19: note = Synthetic
EAIGKSAGKCMNGKCKCYP

SEQ ID NO: 2417 - protein, 26 aa, synthetic construct
  REGION 1..26: note = Synthetic
INGLYNIVKHVNTLVFKRFNEGLTYS

SEQ ID NO: 2418 - protein, 15 aa, synthetic construct
  REGION 1..15: note = Synthetic
LKTLFTTIWKFIKKD

SEQ ID NO: 2419 - protein, 30 aa, synthetic construct
  REGION 1..30: note = Synthetic
FLSTVKNLATNVAGTVIDTLKCKVTGGCRS

SEQ ID NO: 2420 - protein, 26 aa, synthetic construct
  REGION 1..26: note = Synthetic
GQCDECCKKAGDRAGTCVYYKCKCNP

SEQ ID NO: 2421 - protein, 26 aa, synthetic construct
  REGION 1..26: note = Synthetic
GQCDECCKKAGDRAGTCVYYKCKCNP

SEQ ID NO: 2422 - protein, 16 aa, synthetic construct
  REGION 1..16: note = Synthetic
DKIKDAATGFVTGIQS

SEQ ID NO: 2423 - protein, 32 aa, synthetic construct
  REGION 1..32: note = Synthetic
VCQRFCKNLTYIFNNRTYTHKCCNSDFCNFRL

SEQ ID NO: 2424 - protein, 23 aa, synthetic construct
  REGION 1..23: note = Synthetic
LPAIVGAAAKFLPKIFCVISKKC

SEQ ID NO: 2425 - protein, 23 aa, synthetic construct
  REGION 1..23: note = Synthetic
FSQARSYCSRLGRCCHVGKGYSG

SEQ ID NO: 2426 - protein, 23 aa, synthetic construct
  REGION 1..23: note = Synthetic
WSKIKEAAKTAGKAAMGFVNEMV

SEQ ID NO: 2427 - protein, 30 aa, synthetic construct
  REGION 1..30: note = Synthetic
GDAKAAWKELNKNFNSEAQHQLEKLGLPHA

SEQ ID NO: 2428 - protein, 26 aa, synthetic construct
  REGION 1..26: note = Synthetic
GQCDECCKKAGDRAGTCVYYKCKCNP

SEQ ID NO: 2429 - protein, 16 aa, synthetic construct
  REGION 1..16: note = Synthetic
DKFKDAATGFVTGIQS

SEQ ID NO: 2430 - protein, 31 aa, synthetic construct
  REGION 1..31: note = Synthetic
HTLLKILSTFLYQLFSSSIVVALFTLVPYSI

SEQ ID NO: 2431 - protein, 34 aa, synthetic construct
  REGION 1..34: note = Synthetic
HTLLKILSTFLYQLFSSSIVVAIFTLIPYLIFGA

SEQ ID NO: 2432 - protein, 41 aa, synthetic construct
  REGION 1..41: note = Synthetic
SVCDNMDNVFRGQEMKFDMGLCSNACARFCNDGAVIQSVEA

SEQ ID NO: 2433 - protein, 25 aa, synthetic construct
  REGION 1..25: note = Synthetic
SPIKRIIRDVKEIVRARNGLQFSLF

SEQ ID NO: 2434 - protein, 18 aa, synthetic construct
  REGION 1..18: note = Synthetic
LQSFLELVHRVLRHLAQP

SEQ ID NO: 2435 - protein, 18 aa, synthetic construct
  REGION 1..18: note = Synthetic
KTADTFATKLVQCVKDNL

SEQ ID NO: 2436 - protein, 42 aa, synthetic construct
  REGION 1..42: note = Synthetic
ITQAIQCAKRVVRDPQGIRAWVAWQRHCQNRDLSGYIRNCGV

SEQ ID NO: 2437 - protein, 11 aa, synthetic construct
  REGION 1..11: note = Synthetic
IDEVEDWIASY

SEQ ID NO: 2438 - protein, 42 aa, synthetic construct
  REGION 1..42: note = Synthetic
KAVEQVKSVFSKLQERGVYKAMSEFDIFINYIETYTTMKMKN

SEQ ID NO: 2439 - protein, 13 aa, synthetic construct
  REGION 1..13: note = Synthetic
GGRCVNTICNCRN

SEQ ID NO: 2440 - protein, 15 aa, synthetic construct
  REGION 1..15: note = Synthetic
DFLHELTNFVRYLQK

SEQ ID NO: 2441 - protein, 15 aa, synthetic construct
  REGION 1..15: note = Synthetic
DFLHELTNFVRYLQK

SEQ ID NO: 2442 - protein, 15 aa, synthetic construct
  REGION 1..15: note = Synthetic
DFLHELTNFVRYLQK

SEQ ID NO: 2443 - protein, 15 aa, synthetic construct
  REGION 1..15: note = Synthetic
DFLHELTNFVRYLQK

SEQ ID NO: 2444 - protein, 29 aa, synthetic construct
  REGION 1..29: note = Synthetic
CNDMCSRMARGCQHFTFCTRPGQCCCWFT

SEQ ID NO: 2445 - protein, 41 aa, synthetic construct
  REGION 1..41: note = Synthetic
DYYGDLAARLGYFPSSIVREDQTLKPGKVDVKTDKWDFYCQ

SEQ ID NO: 2446 - protein, 14 aa, synthetic construct
  REGION 1..14: note = Synthetic
EKFKRIANSFLQKN

SEQ ID NO: 2447 - protein, 21 aa, synthetic construct
  REGION 1..21: note = Synthetic
DFINNMYTVFEEFTEMITNLP

SEQ ID NO: 2448 - protein, 16 aa, synthetic construct
  REGION 1..16: note = Synthetic
VDEVFDEVVQIFDKEG

SEQ ID NO: 2449 - protein, 30 aa, synthetic construct
  REGION 1..30: note = Synthetic
GLAGAISSVLDKLKQSQLIKNYAKKLGYPR

SEQ ID NO: 2450 - protein, 20 aa, synthetic construct
  REGION 1..20: note = Synthetic
KVISKGASMCKVLFDKKKQE

SEQ ID NO: 2451 - protein, 30 aa, synthetic construct
  REGION 1..30: note = Synthetic
MSSVYGNGKSILRGILRNGVCCGYKLCHPC

SEQ ID NO: 2452 - protein, 34 aa, synthetic construct
  REGION 1..34: note = Synthetic
CAEPCGNFCHKASDKPGGRRVDPNASCKTGYVYW

SEQ ID NO: 2453 - protein, 34 aa, synthetic construct; identical to SEQ ID NO: 2452
  REGION 1..34: note = Synthetic

SEQ ID NO: 2454 - protein, 30 aa, synthetic construct
  REGION 1..30: note = Synthetic
WTEYLKWYNHICDFTLPFICKFLAEPDDPE

SEQ ID NO: 2455 - protein, 40 aa, synthetic construct
  REGION 1..40: note = Synthetic
YYDTFTKLCNTFQHTGCGGNSNHFKDWNDCFFTCGNGFET

SEQ ID NO: 2456 - protein, 28 aa, synthetic construct
  REGION 1..28: note = Synthetic
KHAHSMITSMLTFVSSVMNFGRSFVKDQ

SEQ ID NO: 2457 - protein, 28 aa, synthetic construct
  REGION 1..28: note = Synthetic
KHAHSMITSMLTFVSSVMNFGRSFVKDQ

SEQ ID NO: 2458 - protein, 22 aa, synthetic construct
  REGION 1..22: note = Synthetic
IKRFSTLWRDIWQVASNFRHYE

SEQ ID NO: 2459 - protein, 21 aa, synthetic construct
  REGION 1..21: note = Synthetic
LEDLEDLVTRAIYEFDLDELL

SEQ ID NO: 2460 - protein, 19 aa, synthetic construct
  REGION 1..19: note = Synthetic
KTIKNLMKAFSQKRSKRAP

SEQ ID NO: 2461 - protein, 31 aa, synthetic construct
  REGION 1..31: note = Synthetic
AKGRELLKDYANRVINGGPEEEAAVPAERRR

SEQ ID NO: 2462 - protein, 29 aa, synthetic construct
  REGION 1..29: note = Synthetic
KQCLKPCKDLYGPHAGAKCMNGKCKCYNN

SEQ ID NO: 2463 - protein, 29 aa, synthetic construct
  REGION 1..29: note = Synthetic
KQCLKPCKDLYGPHAGAKCMNGKCKCYNN

SEQ ID NO: 2464 - protein, 17 aa, synthetic construct
  REGION 1..17: note = Synthetic
LFDVIKKVASVIGLASQ

SEQ ID NO: 2465 - protein, 16 aa, synthetic construct
  REGION 1..16: note = Synthetic
LARRMNEVFKEMLRPQ

SEQ ID NO: 2466 - protein, 25 aa, synthetic construct
  REGION 1..25: note = Synthetic
GDCCRYGERCISTGVNYYCRPDFGP

SEQ ID NO: 2467 - protein, 15 aa, synthetic construct
  REGION 1..15: note = Synthetic
YCRFGNTIYGLCCRR

SEQ ID NO: 2468 - protein, 24 aa, synthetic construct
  REGION 1..24: note = Synthetic
DDYTKCCKSFDAFITCGFLLSKES

SEQ ID NO: 2469 - protein, 13 aa, synthetic construct
  REGION 1..13: note = Synthetic
KWVQEYINYLELK

SEQ ID NO: 2470 - protein, 26 aa, synthetic construct
  REGION 1..26: note = Synthetic
EDMSELIERAYTVAYERVYPPTSSKK

SEQ ID NO: 2471 - protein, 25 aa, synthetic construct
  REGION 1..25: note = Synthetic
GDCCRYGERCISTGVNYYCKPDFGP

SEQ ID NO: 2472 - protein, 16 aa, synthetic construct
  REGION 1..16: note = Synthetic
DKLKDAATGFVTGIQS

SEQ ID NO: 2473 - protein, 15 aa, synthetic construct
  REGION 1..15: note = Synthetic
KYIEKVVDKAKTVVG

SEQ ID NO: 2474 - protein, 19 aa, synthetic construct
  REGION 1..19: note = Synthetic
QAIGKAAGKCMNGKCKCYP

SEQ ID NO: 2475 - protein, 14 aa, synthetic construct
  REGION 1..14: note = Synthetic
KCCRTIQTCGNTTD

SEQ ID NO: 2476 - protein, 28 aa, synthetic construct
  REGION 1..28: note = Synthetic
SSIIYNIGKFFSYLLSHQSSSLLQRESL

SEQ ID NO: 2477 - protein, 32 aa, synthetic construct
  REGION 1..32: note = Synthetic
CSLLQEAFQRFSTCAGTSVFPQGQKSLGSITR

SEQ ID NO: 2478 - protein, 19 aa, synthetic construct
  REGION 1..19: note = Synthetic
NVYSRGCTTINRCRRVQNP

SEQ ID NO: 2479 - protein, 40 aa, synthetic construct; identical to SEQ ID NO: 2259
  REGION 1..40: note = Synthetic

SEQ ID NO: 2480 - protein, 20 aa, synthetic construct
  REGION 1..20: note = Synthetic
NKIETIAKNALRGLRDVTHL

SEQ ID NO: 2481 - protein, 24 aa, synthetic construct
  REGION 1..24: note = Synthetic
LSTLQTAVTQLANSLGTVVGQISG

SEQ ID NO: 2482 - protein, 14 aa, synthetic construct
  REGION 1..14: note = Synthetic
EKFTRIANSFLQKN

SEQ ID NO: 2483 - protein, 32 aa, synthetic construct
  REGION 1..32: note = Synthetic
FGKRGLSDLSDLDELFDGEITKADLDLLREIM

SEQ ID NO: 2484 - protein, 27 aa, synthetic construct
  REGION 1..27: note = Synthetic
QLWKGIGKCIKTDDHKLLCLCKYECIV

SEQ ID NO: 2485 - protein, 35 aa, synthetic construct
  REGION 1..35: note = Synthetic
ACQGYMRKCGRDKPPCCKKLECSKTWRWCVWNPWE

SEQ ID NO: 2486 - protein, 35 aa, synthetic construct
  REGION 1..35: note = Synthetic
RRCKYVLESAARAAQVAASVNAAARAGDRVAARAS

SEQ ID NO: 2487 - protein, 22 aa, synthetic construct
  REGION 1..22: note = Synthetic
NWGEGIMGICKKRYGSPILCCR

SEQ ID NO: 2488 - protein, 41 aa, synthetic construct
  REGION 1..41: note = Synthetic
LKQILQRWGEECRACAEKSDYVNLIRELAPKYVEIYPQTEL

SEQ ID NO: 2489 - protein, 11 aa, synthetic construct
  REGION 1..11: note = Synthetic
MTQGQHFLQKV

SEQ ID NO: 2490 - protein, 28 aa, synthetic construct
  REGION 1..28: note = Synthetic
IKRLASTAFSMANHIEHTFRKNSNKKDD

SEQ ID NO: 2491 - protein, 20 aa, synthetic construct
  REGION 1..20: note = Synthetic
RLHNVVGTCYEGKGKCCHKN

SEQ ID NO: 2492 - protein, 42 aa, synthetic construct
  REGION 1..42: note = Synthetic
CLRACNSCCSRCNCVPPGTSGNTHLCPCYASITTHGGRLKCP

SEQ ID NO: 2493 - protein, 14 aa, synthetic construct
  REGION 1..14: note = Synthetic
NDLCSHIDEAFRYL

SEQ ID NO: 2494 - protein, 36 aa, synthetic construct
  REGION 1..36: note = Synthetic
RKAVHELIQVMAELSPAAKIGKRKRSQMFRGRRASQ

SEQ ID NO: 2495 - protein, 19 aa, synthetic construct
  REGION 1..19: note = Synthetic
FEQLIEKIKNMWYTRVLGY

SEQ ID NO: 2496 - protein, 14 aa, synthetic construct
  REGION 1..14: note = Synthetic
FADLFGKAVDFIKS

SEQ ID NO: 2497 - protein, 41 aa, synthetic construct; identical to SEQ ID NO: 2432
  REGION 1..41: note = Synthetic

SEQ ID NO: 2498 - protein, 22 aa, synthetic construct
  REGION 1..22: note = Synthetic
ATKAGRRVINARRRKGRAKLTV

SEQ ID NO: 2499 - protein, 36 aa, synthetic construct
  REGION 1..36: note = Synthetic
ASQALKRGCKSVPGPAGKRFPECCPTTLCRGKQWGQ

SEQ ID NO: 2500 - protein, 24 aa, synthetic construct
  REGION 1..24: note = Synthetic
RGCRRCCSYLGEAMDAETQADPHN

SEQ ID NO: 2501 - protein, 42 aa, synthetic construct
  REGION 1..42: note = Synthetic
KAVEQVKSAFSKLQEKGVYKAMSEFDIFINYIEAYMTTKMKN

SEQ ID NO: 2502 - protein, 35 aa, synthetic construct
  REGION 1..35: note = Synthetic
TCMKDFVKKGGVMNKPISCECDNLGYEHLCRCNFS

SEQ ID NO: 2503 - protein, 29 aa, synthetic construct
  REGION 1..29: note = Synthetic
VSEVQNCMRSLNNLMMLTGERGGFLEKKW

SEQ ID NO: 2504 - protein, 17 aa, synthetic construct
  REGION 1..17: note = Synthetic
FQRFLETAYRALRHLAR

SEQ ID NO: 2505 - protein, 36 aa, synthetic construct; identical to SEQ ID NO: 2494
  REGION 1..36: note = Synthetic

SEQ ID NO: 2506 - protein, 36 aa, synthetic construct
  REGION 1..36: note = Synthetic
RKAVHELIQVMAELSPAAKIGKRKRSQTFRGRRASQ

SEQ ID NO: 2507 - protein, 36 aa, synthetic construct; identical to SEQ ID NO: 2494
  REGION 1..36: note = Synthetic

SEQ ID NO: 2508 - protein, 36 aa, synthetic construct; identical to SEQ ID NO: 2494
  REGION 1..36: note = Synthetic

SEQ ID NO: 2509 - protein, 28 aa, synthetic construct
  REGION 1..28: note = Synthetic
ITDALKGAAKTVAAELLRKAHCKLTNSC

SEQ ID NO: 2510 - protein, 42 aa, synthetic construct; identical to SEQ ID NO: 2321
  REGION 1..42: note = Synthetic

SEQ ID NO: 2511 - protein, 19 aa, synthetic construct
  REGION 1..19: note = Synthetic
VDQVIEKMKNLCYKNFVGY

SEQ ID NO: 2512 - protein, 22 aa, synthetic construct
  REGION 1..22: note = Synthetic
CSRGMRDCCTSCLLYSNKCRRY

SEQ ID NO: 2513 - protein, 24 aa, synthetic construct
  REGION 1..24: note = Synthetic
RHLARTLLTAAREPRPAPPSSNKV

SEQ ID NO: 2514 - protein, 30 aa, synthetic construct
  REGION 1..30: note = Synthetic
QNLHTIITRICYRVRTSQTWPLFPLACASM

SEQ ID NO: 2515 - protein, 15 aa, synthetic construct
  REGION 1..15: note = Synthetic
ITEFLNKWITFCQSI

SEQ ID NO: 2516 - protein, 25 aa, synthetic construct
  REGION 1..25: note = Synthetic
QECTDCCKKYGHNGGTCMFFKCKCA

SEQ ID NO: 2517 - protein, 22 aa, synthetic construct
  REGION 1..22: note = Synthetic
GMATKAGTALGKVAKAVIGAAL

SEQ ID NO: 2518 - protein, 21 aa, synthetic construct
  REGION 1..21: note = Synthetic
GLLSKVLGVGKKVLCGVSGLC

SEQ ID NO: 2519 - protein, 21 aa, synthetic construct
  REGION 1..21: note = Synthetic
DDMNDYCTGISSDCPRNPYKD

SEQ ID NO: 2520 - protein, 25 aa, synthetic construct
  REGION 1..25: note = Synthetic
QECTDCCKKYGHNGGTCMFFKCKCA

SEQ ID NO: 2521 - protein, 42 aa, synthetic construct
  REGION 1..42: note = Synthetic
IADAVTCAKRVVRDPQGIRAWVAWRNHCQNRDVSQYVQGCGV

SEQ ID NO: 2522 - protein, 42 aa, synthetic construct; identical to SEQ ID NO: 2521
  REGION 1..42: note = Synthetic

SEQ ID NO: 2523 - protein, 42 aa, synthetic construct; identical to SEQ ID NO: 2521
  REGION 1..42: note = Synthetic

SEQ ID NO: 2524 - protein, 19 aa, synthetic construct
  REGION 1..19: note = Synthetic
WDYIAHDLLHKVKSISTCK

SEQ ID NO: 2525 - protein, 20 aa, synthetic construct
  REGION 1..20: note = Synthetic
SRLDSFIQKAISKLRSSAAN

SEQ ID NO: 2526 - protein, 30 aa, synthetic construct
  REGION 1..30: note = Synthetic
AKWLQRLLRHVQSKSLSSTPQAPVSKRRAA

SEQ ID NO: 2527 - protein, 19 aa, synthetic construct
  REGION 1..19: note = Synthetic
IKGLLGSVTEAKNGYRTYK

SEQ ID NO: 2528 - protein, 36 aa, synthetic construct
  REGION 1..36: note = Synthetic
ARLGRQVDSMWAEQKQMELESILVALLQKHSRNSQG

SEQ ID NO: 2529 - protein, 42 aa, synthetic construct
  REGION 1..42: note = Synthetic
GLYRNLSSMANKTCSMNEIKKSTLKDFLERLKVIMQKKYYRH

SEQ ID NO: 2530 - protein, 37 aa, synthetic construct
  REGION 1..37: note = Synthetic
KAVNELFKVMNGDLSPKSNLRKRKRSQSTFHGRRASI

SEQ ID NO: 2531 - protein, 12 aa, synthetic construct
  REGION 1..12: note = Synthetic
CGWVNRAWRGLV

SEQ ID NO: 2532 - protein, 12 aa, synthetic construct
  REGION 1..12: note = Synthetic
CGWVNRAWRGLV

SEQ ID NO: 2533 - protein, 12 aa, synthetic construct
  REGION 1..12: note = Synthetic
CGWVNRAWRGLV

SEQ ID NO: 2534 - protein, 26 aa, synthetic construct
  REGION 1..26: note = Synthetic
WAQSLISLFQALRHDLMRSSSPAVSS

SEQ ID NO: 2535 - protein, 34 aa, synthetic construct
  REGION 1..34: note = Synthetic
CAEPCGNFCHKASDKPGGRRVDPNASCQTGYVYW

SEQ ID NO: 2536 - protein, 34 aa, synthetic construct; identical to SEQ ID NO: 2535
  REGION 1..34: note = Synthetic

SEQ ID NO: 2537 - protein, 34 aa, synthetic construct; identical to SEQ ID NO: 2535
  REGION 1..34: note = Synthetic

SEQ ID NO: 2538 - protein, 34 aa, synthetic construct; identical to SEQ ID NO: 2535
  REGION 1..34: note = Synthetic

SEQ ID NO: 2539 - protein, 35 aa, synthetic construct
  REGION 1..35: note = Synthetic
LAKVANTLISDISELKDKVQNVSGYTISSALQNIG

SEQ ID NO: 2540 - protein, 12 aa, synthetic construct
  REGION 1..12: note = Synthetic
IYGSYSGVGSSL

SEQ ID NO: 2541 - protein, 12 aa, synthetic construct
  REGION 1..12: note = Synthetic
IYGSYSGVGSSL

SEQ ID NO: 2542 - protein, 38 aa, synthetic construct
  REGION 1..38: note = Synthetic
RECTKLLGGCTKDSECCPHLGCRKKWPYHCGWDGTFGK

SEQ ID NO: 2543 - protein, 14 aa, synthetic construct
  REGION 1..14: note = Synthetic
WYEWINRCSNLLED

SEQ ID NO: 2544 - protein, 23 aa, synthetic construct
  REGION 1..23: note = Synthetic
IYTMCEIASDACQNWFPTSVEKK

SEQ ID NO: 2545 - protein, 28 aa, synthetic construct
  REGION 1..28: note = Synthetic
SQLLKVLHKIWTQVPCHLNSDGTNALHF

SEQ ID NO: 2546 - protein, 35 aa, synthetic construct
  REGION 1..35: note = Synthetic
SVFKEYAGSMGESCGGLWLAILLLLASIAAGLSLS

SEQ ID NO: 2547 - protein, 12 aa, synthetic construct
  REGION 1..12: note = Synthetic
FYGSYSGVGSSL

SEQ ID NO: 2548 - protein, 21 aa, synthetic construct
  REGION 1..21: note = Synthetic
MGGLAGDLLRILHATSRGRPQ

SEQ ID NO: 2549 - protein, 29 aa, synthetic construct
  REGION 1..29: note = Synthetic
HLIRAIRTVMTFPLIAINTIVIVYNLVLG

SEQ ID NO: 2550 - protein, 14 aa, synthetic construct
  REGION 1..14: note = Synthetic
IGHLIKTALGFLGL

SEQ ID NO: 2551 - protein, 11 aa, synthetic construct
  REGION 1..11: note = Synthetic
ELVSGIVEGVK

SEQ ID NO: 2552 - protein, 11 aa, synthetic construct
  REGION 1..11: note = Synthetic
ELVSGIVEGVK

SEQ ID NO: 2553 - protein, 11 aa, synthetic construct
  REGION 1..11: note = Synthetic
ELVSGIVEGVK

SEQ ID NO: 2554 - protein, 11 aa, synthetic construct
  REGION 1..11: note = Synthetic
ELVSGIVEGVK

SEQ ID NO: 2555 - protein, 26 aa, synthetic construct
  REGION 1..26: note = Synthetic
CKAAGKPCSRIAYNCCTGSCRSGKCG

SEQ ID NO: 2556 - protein, 36 aa, synthetic construct; identical to SEQ ID NO: 2494
  REGION 1..36: note = Synthetic

SEQ ID NO: 2557 - protein, 35 aa, synthetic construct
  REGION 1..35: note = Synthetic
ECDKAVATCFRDNLDTYNKKQQFNTGIFCSKAKAC

SEQ ID NO: 2558 - protein, 32 aa, synthetic construct
  REGION 1..32: note = Synthetic
FIKGAKNIGKEVGMDVIRTGIDVAGCKIKGEC

SEQ ID NO: 2559 - protein, 25 aa, synthetic construct
  REGION 1..25: note = Synthetic
ADCCRYGERCISTGVNYYCRPDFGP

SEQ ID NO: 2560 - protein, 21 aa, synthetic construct
  REGION 1..21: note = Synthetic
KAVEFLNKWITFCQRIYSTMT

SEQ ID NO: 2561 - protein, 24 aa, synthetic construct
  REGION 1..24: note = Synthetic
KGFNDLVDNINKAFSNLKPENAKQ

SEQ ID NO: 2562 - protein, 33 aa, synthetic construct
  REGION 1..33: note = Synthetic
FYGECVECLNSGERCWRNSECCSGYCRWFTCQD

SEQ ID NO: 2563 - protein, 34 aa, synthetic construct
  REGION 1..34: note = Synthetic
GKEYDSCIKEGSVFSKYWCPVTPNYDQDRAWRYC

SEQ ID NO: 2564 - protein, 12 aa, synthetic construct
  REGION 1..12: note = Synthetic
GQAVLNSASEAL

SEQ ID NO: 2565 - protein, 19 aa, synthetic construct
  REGION 1..19: note = Synthetic
NPWTEACHEIRSCFSCARV

SEQ ID NO: 2566 - protein, 36 aa, synthetic construct
  REGION 1..36: note = Synthetic
ECDRVAAECLRRSLSTYKYGYMFYLDSRCKGPSEQC

SEQ ID NO: 2567 - protein, 32 aa, synthetic construct
  REGION 1..32: note = Synthetic
LLDSLKGFAATAGKGVLQSLLSTASCKLAKTC

SEQ ID NO: 2568 - protein, 38 aa, synthetic construct
  REGION 1..38: note = Synthetic
RACREWLGGCSKDADCCAHLECRKKWPYHCVWDWTVRK

SEQ ID NO: 2569 - protein, 27 aa, synthetic construct
  REGION 1..27: note = Synthetic
MLDGLNDYCTGVTSDCPRNPYKGKEDD

SEQ ID NO: 2570 - protein, 17 aa, synthetic construct
  REGION 1..17: note = Synthetic
KWIQEYLEKALNKKVKT

SEQ ID NO: 2571 - protein, 18 aa, synthetic construct
  REGION 1..18: note = Synthetic
LQSFLEVAYRALRHFTKP

SEQ ID NO: 2572 - protein, 37 aa, synthetic construct
  REGION 1..37: note = Synthetic
GRGCKGFGDSCTPGKNECCPNHACSNKHKWCKVYLGK

SEQ ID NO: 2573 - protein, 15 aa, synthetic construct
  REGION 1..15: note = Synthetic
ILGIITSLLKSLGKK

SEQ ID NO: 2574 - protein, 19 aa, synthetic construct
  REGION 1..19: note = Synthetic
RACQQFLKRCHLASFALPL

SEQ ID NO: 2575 - protein, 35 aa, synthetic construct
  REGION 1..35: note = Synthetic
RLGRQVDSMWADHRQMSLESLLAALLQKHSRDSQG

SEQ ID NO: 2576 - protein, 29 aa, synthetic construct
  REGION 1..29: note = Synthetic
SLADQAANKWGRSGRDPNHFRPAGLPEKY

SEQ ID NO: 2577 - protein, 27 aa, synthetic construct
  REGION 1..27: note = Synthetic
EHIQHLFDSMLRRLEAFIAAHGGCTKY

SEQ ID NO: 2578 - protein, 25 aa, synthetic construct
  REGION 1..25: note = Synthetic
CDSAKKILDEVEKLAEAEGVTGKTR

SEQ ID NO: 2579 - protein, 33 aa, synthetic construct
  REGION 1..33: note = Synthetic
DRASKVIQEAKNLPPRCNQGPPCNIPGTIGYYW

SEQ ID NO: 2580 - protein, 17 aa, synthetic construct
  REGION 1..17: note = Synthetic
GDALYNEIKTWPHWRQN

SEQ ID NO: 2581 - protein, 31 aa, synthetic construct
  REGION 1..31: note = Synthetic
FDKIREFIQYLHEIAEEVGIDDNQMSNIKIT

SEQ ID NO: 2582 - protein, 28 aa, synthetic construct
  REGION 1..28: note = Synthetic
SSVNDIGDDWKATRVGINIFTRLRTQKE

SEQ ID NO: 2583 - protein, 17 aa, synthetic construct
  REGION 1..17: note = Synthetic
FLNKWITFCQSIYSTMT

SEQ ID NO: 2584 - protein, 22 aa, synthetic construct
  REGION 1..22: note = Synthetic
TIVEFLNRWITFCQSIISASSS

SEQ ID NO: 2585 - protein, 22 aa, synthetic construct
  REGION 1..22: note = Synthetic
TIVEFLNRWITFCQSIISASSS

SEQ ID NO: 2586 - protein, 22 aa, synthetic construct
  REGION 1..22: note = Synthetic
TIVEFLNRWITFCQSIISASSS

SEQ ID NO: 2587 - protein, 33 aa, synthetic construct
  REGION 1..33: note = Synthetic
SWLSTVLTTLYSMWLSFPLTHKVKPDLVLCNGP

SEQ ID NO: 2588 - protein, 17 aa, synthetic construct
  REGION 1..17: note = Synthetic
FLNKWITFCQSIYSTMT

SEQ ID NO: 2589 - protein, 17 aa, synthetic construct
  REGION 1..17: note = Synthetic
FLNKWITFCQSIYSTMT

SEQ ID NO: 2590 - protein, 20 aa, synthetic construct
  REGION 1..20: note = Synthetic
IDVITDALTRAEECAKRGSN

SEQ ID NO: 2591 - protein, 26 aa, synthetic construct
  REGION 1..26: note = Synthetic
WIAYCNNIMSCCRKDTDFVLPQTKGI

SEQ ID NO: 2592 - protein, 32 aa, synthetic construct
  REGION 1..32: note = Synthetic
LISGLKSVGKEVGMDVVRTGIDIAGCKIKGEC

SEQ ID NO: 2593 - protein, 30 aa, synthetic construct
  REGION 1..30: note = Synthetic
VMSSCKTIVQTLLNNSTGTFIAPPSKPSSL

SEQ ID NO: 2594 - protein, 14 aa, synthetic construct
  REGION 1..14: note = Synthetic
KWVQKYISDLKLNA

SEQ ID NO: 2595 - protein, 20 aa, synthetic construct
  REGION 1..20: note = Synthetic
SIAKTLAKSVSHVLCISKTQ

SEQ ID NO: 2596 - protein, 38 aa, synthetic construct
  REGION 1..38: note = Synthetic
NGAVSGYCQWLGKYGNACWCINLPDKVPIRIPGACRGR

SEQ ID NO: 2597 - protein, 12 aa, synthetic construct
  REGION 1..12: note = Synthetic
CGWVSRAWRGLV

SEQ ID NO: 2598 - protein, 19 aa, synthetic construct
  REGION 1..19: note = Synthetic
ISDILRIASTALQKLALQC

SEQ ID NO: 2599 - protein, 24 aa, synthetic construct
  REGION 1..24: note = Synthetic
RRVKQFLDYLQEFLTVINTEWTME

SEQ ID NO: 2600 - protein, 31 aa, synthetic construct
  REGION 1..31: note = Synthetic
RNAREILQRLETIAQDPRMCEICAFAACAGC

SEQ ID NO: 2601 - protein, 19 aa, synthetic construct
  REGION 1..19: note = Synthetic
KTADTFATKLVQCVKDNLI

SEQ ID NO: 2602 - protein, 17 aa, synthetic construct
  REGION 1..17: note = Synthetic
LFDIIKKVASVVGLASQ

SEQ ID NO: 2603 - protein, 26 aa, synthetic construct
  REGION 1..26: note = Synthetic
SQFHQLVNRCIHGVQAARPGFGRWRG

SEQ ID NO: 2604 - protein, 35 aa, synthetic construct
  REGION 1..35: note = Synthetic
LTQAFKDMVKVVNQVLNSDTATYNAIFDKYFLPEH

SEQ ID NO: 2605 - protein, 19 aa, synthetic construct
  REGION 1..19: note = Synthetic
TSLKDFLESLKSIMQMDYS

SEQ ID NO: 2606 - protein, 14 aa, synthetic construct
  REGION 1..14: note = Synthetic
IQFYKKIIANGYAK

SEQ ID NO: 2607 - protein, 12 aa, synthetic construct
  REGION 1..12: note = Synthetic
CGWVGRAWKGLV

SEQ ID NO: 2608 - protein, 21 aa, synthetic construct
  REGION 1..21: note = Synthetic
EEIHKVIKQAIEWLKELDLDL

SEQ ID NO: 2609 - protein, 35 aa, synthetic construct
  REGION 1..35: note = Synthetic
RMVNDFYKAFRDLDRCQEYCNWRVERDGVFGYNDK

SEQ ID NO: 2610 - protein, 23 aa, synthetic construct
  REGION 1..23: note = Synthetic
MGLCSNACARFCNDGEVIQSVEA

SEQ ID NO: 2611 - protein, 23 aa, synthetic construct
  REGION 1..23: note = Synthetic
MGLCSNACARFCNDGEVIQSVEA

SEQ ID NO: 2612 - protein, 37 aa, synthetic construct
  REGION 1..37: note = Synthetic
KLMELGHKIMRNLENTVKETIKYLKSLFSHAFEVVKT

SEQ ID NO: 2613 - protein, 28 aa, synthetic construct
  REGION 1..28: note = Synthetic
FISTVKNLATNVAGTVIDTIKCKVTGGC

SEQ ID NO: 2614 - protein, 42 aa, synthetic construct
  REGION 1..42: note = Synthetic
IADAVTCAKRVVRDPQGIRAWVAWRNHCHNRDVSQYVQGCGV

SEQ ID NO: 2615 - protein, 35 aa, synthetic construct
  REGION 1..35: note = Synthetic
EWEDFIQNMINFVNKIFELYPHLNTKVHLVGNSAA

SEQ ID NO: 2616 - protein, 17 aa, synthetic construct
  REGION 1..17: note = Synthetic
LESILQGFPRMKPSADA

SEQ ID NO: 2617 - protein, 36 aa, synthetic construct
  REGION 1..36: note = Synthetic
RGCRGFGDSCTPGKNECCPNHACSNKHKWCKVYLGK

SEQ ID NO: 2618 - protein, 36 aa, synthetic construct
  REGION 1..36: note = Synthetic
SKGGKCLRRCSQIVPTDIIGVCADGVPCCKSRQSTG

SEQ ID NO: 2619 - protein, 17 aa, synthetic construct
  REGION 1..17: note = Synthetic
VGKAAGKCMNGKCKCYT

SEQ ID NO: 2620 - protein, 28 aa, synthetic construct
  REGION 1..28: note = Synthetic
VTTFEDFIKNLKGFLFDIPFDCWKPVQK

SEQ ID NO: 2621 - protein, 34 aa, synthetic construct
  REGION 1..34: note = Synthetic
RLGRQVDGVWTDQQQMALESTLVSLLQERRNSQG

SEQ ID NO: 2622 - protein, 20 aa, synthetic construct
  REGION 1..20: note = Synthetic
CKGLGKSMESCQGDTCKCKA

SEQ ID NO: 2623 - protein, 18 aa, synthetic construct
  REGION 1..18: note = Synthetic
LQRLLELVYRVLRHLAEP

SEQ ID NO: 2624 - protein, 15 aa, synthetic construct
  REGION 1..15: note = Synthetic
DFLQQLTNFVRYLQK

SEQ ID NO: 2625 - protein, 22 aa, synthetic construct
  REGION 1..22: note = Synthetic
WFDPVKRCCSRYCYICIPCCPN

SEQ ID NO: 2626 - protein, 22 aa, synthetic construct
  REGION 1..22: note = Synthetic
WFDPVKRCCSRYCYICIPCCPN

SEQ ID NO: 2627 - protein, 14 aa, synthetic construct
  REGION 1..14: note = Synthetic
LKEFAGGVVTGVQS

SEQ ID NO: 2628 - protein, 14 aa, synthetic construct
  REGION 1..14: note = Synthetic
LKEFAGGVVTGVQS

SEQ ID NO: 2629 - protein, 41 aa, synthetic construct
  REGION 1..41: note = Synthetic
EFMQRALQDLRKTAYSLDARTETLLLQAERRALCACWPAGR

SEQ ID NO: 2630 - protein, 36 aa, synthetic construct
  REGION 1..36: note = Synthetic
RGCKGFGDSCTPGKNECCPNYACSSKHKWCKVLLGK

SEQ ID NO: 2631 - protein, 36 aa, synthetic construct
  REGION 1..36: note = Synthetic
RGCKGFGDSCTPGKNECCPNYACSSKHKWCKVNLGK

SEQ ID NO: 2632 - protein, 36 aa, synthetic construct
  REGION 1..36: note = Synthetic
RGCKGFGDSCTPGKNECCPNHACSNKHKWCKVYLGK

SEQ ID NO: 2633 - protein, 36 aa, synthetic construct; identical to SEQ ID NO: 2632
  REGION 1..36: note = Synthetic

SEQ ID NO: 2634 - protein, 36 aa, synthetic construct; identical to SEQ ID NO: 2632
  REGION 1..36: note = Synthetic

SEQ ID NO: 2635 - protein, 36 aa, synthetic construct; identical to SEQ ID NO: 2632
  REGION 1..36: note = Synthetic

SEQ ID NO: 2636 - protein, 36 aa, synthetic construct
  REGION 1..36: note = Synthetic
RGCKGFGDSCTPGKNECCPNPACSNKHKWCKVYLGK

SEQ ID NO: 2637 - protein, 36 aa, synthetic construct
  REGION 1..36: note = Synthetic
RGCKGFGDSCTPGKNECCPNHACSNKHKWCKAYLGK

SEQ ID NO: 2638 - protein, 25 aa, synthetic construct
  REGION 1..25: note = Synthetic
KLKNFAKGVAQSLLNKASCKLSGQC

SEQ ID NO: 2639 - protein, 19 aa, synthetic construct
  REGION 1..19: note = Synthetic
DKCIETLETIVKYLVQFTT

SEQ ID NO: 2640 - protein, 36 aa, synthetic construct
  REGION 1..36: note = Synthetic
RGCKGFGDSCTPGKNECCPNYACSSKHKWCKVYLGK

SEQ ID NO: 2641 - protein, 36 aa, synthetic construct; identical to SEQ ID NO: 2640
  REGION 1..36: note = Synthetic

SEQ ID NO: 2642 - protein, 36 aa, synthetic construct; identical to SEQ ID NO: 2640
  REGION 1..36: note = Synthetic

SEQ ID NO: 2643 - protein, 36 aa, synthetic construct; identical to SEQ ID NO: 2640
  REGION 1..36: note = Synthetic

SEQ ID NO: 2644 - protein, 36 aa, synthetic construct; identical to SEQ ID NO: 2640
  REGION 1..36: note = Synthetic

SEQ ID NO: 2645 - protein, 36 aa, synthetic construct; identical to SEQ ID NO: 2640
  REGION 1..36: note = Synthetic

SEQ ID NO: 2646 - protein, 36 aa, synthetic construct; identical to SEQ ID NO: 2640
  REGION 1..36: note = Synthetic

SEQ ID NO: 2647 - protein, 36 aa, synthetic construct; identical to SEQ ID NO: 2640
  REGION 1..36: note = Synthetic

SEQ ID NO: 2648 - protein, 36 aa, synthetic construct; identical to SEQ ID NO: 2640
  REGION 1..36: note = Synthetic

SEQ ID NO: 2649 - protein, 36 aa, synthetic construct; identical to SEQ ID NO: 2640
  REGION 1..36: note = Synthetic

SEQ ID NO: 2650 - protein, 36 aa, synthetic construct; identical to SEQ ID NO: 2640
  REGION 1..36: note = Synthetic

SEQ ID NO: 2651 - protein, 36 aa, synthetic construct; identical to SEQ ID NO: 2640
  REGION 1..36: note = Synthetic

SEQ ID NO: 2652 - protein, 36 aa, synthetic construct
  REGION 1..36: note = Synthetic
RGCKGFGDSCTPGKNECCPNYACSGKHKWCKVYLGK

SEQ ID NO: 2653 - protein, 36 aa, synthetic construct
  REGION 1..36: note = Synthetic
RGCKGFGDSCTPGKNECCPNYACSSKHKWCKVYSGK

SEQ ID NO: 2654 - protein, 31 aa, synthetic construct
  REGION 1..31: note = Synthetic
GGIRAAHAILGGLHLTLDWAVRGLLLLKTRL

SEQ ID NO: 2655 - protein, 36 aa, synthetic construct
  REGION 1..36: note = Synthetic
RGCKGFGDSCAPGKNECCPNHACSNKHKWCKVYLGK

SEQ ID NO: 2656 - protein, 18 aa, synthetic construct
  REGION 1..18: note = Synthetic
IKKAGTELVNFLNYFLEL

SEQ ID NO: 2657 - protein, 27 aa, synthetic construct
  REGION 1..27: note = Synthetic
LLDVVKGAAKNLLASALDKLKCKVTGC

SEQ ID NO: 2658 - protein, 42 aa, synthetic construct
  REGION 1..42: note = Synthetic
KAVEQVKNAFNKLQEKGIYKAMSEFDIFINYIEAYMTMKIRN

SEQ ID NO: 2659 - protein, 42 aa, synthetic construct; identical to SEQ ID NO: 2658
  REGION 1..42: note = Synthetic

SEQ ID NO: 2660 - protein, 33 aa, synthetic construct
  REGION 1..33: note = Synthetic
KTIQSWLNKFLSCLHIGKLSLSFLLLAIFSIVF

SEQ ID NO: 2661 - protein, 14 aa, synthetic construct
  REGION 1..14: note = Synthetic
FTKIKDALKKISQH

SEQ ID NO: 2662 - protein, 29 aa, synthetic construct
  REGION 1..29: note = Synthetic
KVLSEAVEQCTKACSSVCTGGSTAAVKSA

SEQ ID NO: 2663 - protein, 26 aa, synthetic construct
  REGION 1..26: note = Synthetic
DDAVDRCGEACYRFCTKHVDAATNVS

SEQ ID NO: 2664 - protein, 23 aa, synthetic construct
  REGION 1..23: note = Synthetic
MGLCSNACARFCNDGDVIQSVEA

SEQ ID NO: 2665 - protein, 24 aa, synthetic construct
  REGION 1..24: note = Synthetic
KVAKTVAKQAAKQGAKYIANKQME

SEQ ID NO: 2666 - protein, 24 aa, synthetic construct
  REGION 1..24: note = Synthetic
KVAKTVAKQAAKQGAKYIANKQTE

SEQ ID NO: 2667 - protein, 14 aa, synthetic construct
  REGION 1..14: note = Synthetic
DLLKDVIEGVEKLL

SEQ ID NO: 2668 - protein, 15 aa, synthetic construct
  REGION 1..15: note = Synthetic
DFLHGLTNFVRYLQK

SEQ ID NO: 2669 - protein, 12 aa, synthetic construct
  REGION 1..12: note = Synthetic
GAQSGMGCGRRF

SEQ ID NO: 2670 - protein, 42 aa, synthetic construct
  REGION 1..42: note = Synthetic
ITEAVACAKRVVRDPQGIRAWVAWKAHCQNRDVSQYVQGCGV

SEQ ID NO: 2671 - protein, 42 aa, synthetic construct
  REGION 1..42: note = Synthetic
ITEAVACAKRVVRDPQGIRAWVAWKAHCQNRDVSQYIQGCGV

SEQ ID NO: 2672 - protein, 23 aa, synthetic construct
  REGION 1..23: note = Synthetic
FESCMKKCSKICNKKKESDDIYV

SEQ ID NO: 2673 - protein, 41 aa, synthetic construct
  REGION 1..41: note = Synthetic
GMIEACIGNGGRCNENVGPPYCCSGFCLRQPNQGYGVCRNR

SEQ ID NO: 2674 - protein, 42 aa, synthetic construct
  REGION 1..42: note = Synthetic
CLKTLAGSVKGINYGAASALPGKCGIRIPYPISPSTDCSRVN

SEQ ID NO: 2675 - protein, 38 aa, synthetic construct
  REGION 1..38: note = Synthetic
KIVDHCPSGCASTLDLSREAFAQIANPVAGIINIDYFP

SEQ ID NO: 2676 - protein, 37 aa, synthetic construct
  REGION 1..37: note = Synthetic
NCAKKIVSDVHGMNAWVAWRNRCKGTDVNAWIRGCRL

SEQ ID NO: 2677 - protein, 40 aa, synthetic construct
  REGION 1..40: note = Synthetic
DFARSVVRKFIDLNQHSFGLVRERDAEQSRFRAICGPQVH

SEQ ID NO: 2678 - protein, 26 aa, synthetic construct
  REGION 1..26: note = Synthetic
IYEMLKDIFHVFERGYTSPGWNETIV

SEQ ID NO: 2679 - protein, 20 aa, synthetic construct
  REGION 1..20: note = Synthetic
RTLQKLWNHARDWCDPCPWG

SEQ ID NO: 2680 - protein, 14 aa, synthetic construct
  REGION 1..14: note = Synthetic
EAVKKLLEALSHLV

SEQ ID NO: 2681 - protein, 14 aa, synthetic construct
  REGION 1..14: note = Synthetic
EAVKKLLEALSHLV

SEQ ID NO: 2682 - protein, 42 aa, synthetic construct
  REGION 1..42: note = Synthetic
ITQAVACAKRVVRDPQGIRAWVAWKAHCQNRDVSQYVQGCGV

SEQ ID NO: 2683 - protein, 30 aa, synthetic construct
  REGION 1..30: note = Synthetic
GQCTDCCKKAGHTGGTCIYFKCKCGAESGR

SEQ ID NO: 2684 - protein, 36 aa, synthetic construct
  REGION 1..36: note = Synthetic
RGCKGFGDSCTPGKNECCPNYACSCKHKWCKVYLGK

SEQ ID NO: 2685 - protein, 14 aa, synthetic construct
  REGION 1..14: note = Synthetic
EAVKKLLEALSHLV

SEQ ID NO: 2686 - protein, 16 aa, synthetic construct
  REGION 1..16: note = Synthetic
LPSLVSGAVSLVKILG

SEQ ID NO: 2687 - protein, 40 aa, synthetic construct
  REGION 1..40: note = Synthetic
KWVKTAIKTVDGRASASKSKAETIPTQAQRSASTAVTLTG

SEQ ID NO: 2688 - protein, 38 aa, synthetic construct
  REGION 1..38: note = Synthetic
SRIAGGVERMQRGCSLTCPDIKYNGKYIYCCTRDNCNA

SEQ ID NO: 2689 - protein, 28 aa, synthetic construct
  REGION 1..28: note = Synthetic
GDSCSRWYNHCCSKLCTSRNSGPTCSRP

SEQ ID NO: 2690 - protein, 36 aa, synthetic construct; identical to SEQ ID NO: 2618
  REGION 1..36: note = Synthetic

SEQ ID NO: 2691 - protein, 22 aa, synthetic construct
  REGION 1..22: note = Synthetic
DNVASAWNQAFDNIFQTVFSHL

SEQ ID NO: 2692 - protein, 14 aa, synthetic construct
  REGION 1..14: note = Synthetic
LSDVLDRWLDGCDL

SEQ ID NO: 2693 - protein, 24 aa, synthetic construct
  REGION 1..24: note = Synthetic
KVAKTVAKQAAKQGAKYIANKQTE

SEQ ID NO: 2694 - protein, 33 aa, synthetic construct
  REGION 1..33: note = Synthetic
CFDCARACMRRGKYIRTCSFERKLCRYSISDIK

SEQ ID NO: 2695 - protein, 16 aa, synthetic construct
  REGION 1..16: note = Synthetic
LFDLLKTIIEGVEKLL

SEQ ID NO: 2696 - protein, 16 aa, synthetic construct
  REGION 1..16: note = Synthetic
LFDLLKTIIEGVEKLL

SEQ ID NO: 2697 - protein, 19 aa, synthetic construct
  REGION 1..19: note = Synthetic
IEQLMEKIANLWYTRVLGY

SEQ ID NO: 2698 - protein, 25 aa, synthetic construct
  REGION 1..25: note = Synthetic
VKKAGTDLLNFLSNFMDLKTQPATQ

SEQ ID NO: 2699 - protein, 25 aa, synthetic construct
  REGION 1..25: note = Synthetic
VKKAGTDLINFLSNFMDLRTQPATQ

SEQ ID NO: 2700 - protein, 25 aa, synthetic construct
  REGION 1..25: note = Synthetic
VKKAGTDLINFLSNFMDLRTQPATQ

SEQ ID NO: 2701 - protein, 38 aa, synthetic construct
  REGION 1..38: note = Synthetic
RKAVSELSNVLNFLSPKSNLKKRKRSQTLFRGRRASKY

SEQ ID NO: 2702 - protein, 20 aa, synthetic construct
  REGION 1..20: note = Synthetic
QAIEGALRIAKKLIGDRWGR

SEQ ID NO: 2703 - protein, 42 aa, synthetic construct
  REGION 1..42: note = Synthetic
KAVEQVKSAFSKLQEEGVYKAMSEFDIFINYIETYMTMKIKS

SEQ ID NO: 2704 - protein, 22 aa, synthetic construct
  REGION 1..22: note = Synthetic
KQFLDYLQEFLGVINTEWTIEG

SEQ ID NO: 2705 - protein, 18 aa, synthetic construct
  REGION 1..18: note = Synthetic
TIVQKFPNLLQQIVYEEC

SEQ ID NO: 2706 - protein, 13 aa, synthetic construct
  REGION 1..13: note = Synthetic
WTTFCQSIYSTLT

SEQ ID NO: 2707 - protein, 12 aa, synthetic construct
  REGION 1..12: note = Synthetic
FYGSYVGLGSSL

SEQ ID NO: 2708 - protein, 12 aa, synthetic construct
  REGION 1..12: note = Synthetic
FYGSYVGLGSSL

SEQ ID NO: 2709 - protein, 12 aa, synthetic construct
  REGION 1..12: note = Synthetic
FYGSYVGLGSSL

SEQ ID NO: 2710 - protein, 12 aa, synthetic construct
  REGION 1..12: note = Synthetic
FYGSYVGLGSSL

SEQ ID NO: 2711 - protein, 12 aa, synthetic construct
  REGION 1..12: note = Synthetic
FYGSYVGLGSSL

SEQ ID NO: 2712 - protein, 12 aa, synthetic construct
  REGION 1..12: note = Synthetic
FYGSYVGLGSSL

SEQ ID NO: 2713 - protein, 12 aa, synthetic construct
  REGION 1..12: note = Synthetic
FYGSYVGLGSSL

SEQ ID NO: 2714 - protein, 12 aa, synthetic construct
  REGION 1..12: note = Synthetic
FYGSYVGLGSSL

SEQ ID NO: 2715 - protein, 28 aa, synthetic construct
  REGION 1..28: note = Synthetic
YEIFDKVKSFFNKIMVKRRKQDDKNVLT

SEQ ID NO: 2716 - protein, 14 aa, synthetic construct
  REGION 1..14: note = Synthetic
IGHLIKTALGMLGL

SEQ ID NO: 2717 - protein, 41 aa, synthetic construct
  REGION 1..41: note = Synthetic
LKQILHSWGEECRACAEKHDYVNLIKELAPKYVETRPQTEL

SEQ ID NO: 2718 - protein, 36 aa, synthetic construct
  REGION 1..36: note = Synthetic
SKGGKCLNRCPQIVPTNVIGVCATGVPCCKSRQSTG

SEQ ID NO: 2719 - protein, 28 aa, synthetic construct
  REGION 1..28: note = Synthetic
EVMKEAVERCNNACSEVCTKGSYAVVTA

SEQ ID NO: 2720 - protein, 29 aa, synthetic construct
  REGION 1..29: note = Synthetic
GICNEGKKCCRRWWILEPYPTPVPKGKSP

SEQ ID NO: 2721 - protein, 29 aa, synthetic construct
  REGION 1..29: note = Synthetic
GICNEGKKCCRRWWILEPYPTPVPKGKSP

SEQ ID NO: 2722 - protein, 41 aa, synthetic construct
  REGION 1..41: note = Synthetic
MDNFKKYLSTAPVLLTVWLSITASGIMIINRLYPDPLIFPI

SEQ ID NO: 2723 - protein, 41 aa, synthetic construct; identical to SEQ ID NO: 2722
  REGION 1..41: note = Synthetic

SEQ ID NO: 2724 - protein, 29 aa, synthetic construct
  REGION 1..29: note = Synthetic
EEANHAVDRCNEACRRFCTKEAETVTVVS

SEQ ID NO: 2725 - protein, 29 aa, synthetic construct
  REGION 1..29: note = Synthetic
EEANHAVDRCNEACRRFCTKEAETVTVVS

SEQ ID NO: 2726 - protein, 29 aa, synthetic construct
  REGION 1..29: note = Synthetic
EEANHAVDRCNEACRRFCSKEAETVTVLS

SEQ ID NO: 2727 - protein, 15 aa, synthetic construct
  REGION 1..15: note = Synthetic
IEKLVNTALGLLSGL

SEQ ID NO: 2728 - protein, 11 aa, synthetic construct
  REGION 1..11: note = Synthetic
IEEVEDWIASY

SEQ ID NO: 2729 - protein, 34 aa, synthetic construct
  REGION 1..34: note = Synthetic
RVIKCIDHICQYARNLPDFASEISESTKMPCKGE

SEQ ID NO: 2730 - protein, 11 aa, synthetic construct
  REGION 1..11: note = Synthetic
INAVSALVHHF

SEQ ID NO: 2731 - protein, 42 aa, synthetic construct
  REGION 1..42: note = Synthetic
KAVEQVKNAFSKLQEKGVYKAMSEFDIFINYIEAYMTMKIRN

SEQ ID NO: 2732 - protein, 33 aa, synthetic construct
  REGION 1..33: note = Synthetic
CFDCARACMRRGKYIRTCSFERKLCRCSISGIK

SEQ ID NO: 2733 - protein, 25 aa, synthetic construct
  REGION 1..25: note = Synthetic
AIEKCISACSTLCTKGFVKPATETA

SEQ ID NO: 2734 - protein, 20 aa, synthetic construct
  REGION 1..20: note = Synthetic
VPKALYSAASCARSICDDNP

SEQ ID NO: 2735 - protein, 40 aa, synthetic construct
  REGION 1..40: note = Synthetic
LGRVGTRYISSLFNKKREEGQSNHANSPTTLPSRIQKMTK

SEQ ID NO: 2736 - protein, 40 aa, synthetic construct
  REGION 1..40: note = Synthetic
LGRVGTRYISSLFNKKREEGQSNHANSPTTSPSRIQKMTK

SEQ ID NO: 2737 - protein, 40 aa, synthetic construct
  REGION 1..40: note = Synthetic
ILRKARNLLNHGILLSSNNRSFCFIIQISKINPFERFLEM

SEQ ID NO: 2738 - protein, 21 aa, synthetic construct
  REGION 1..21: note = Synthetic
KAFSLAQSIFTGNSKSFFCNK

SEQ ID NO: 2739 - protein, 27 aa, synthetic construct
  REGION 1..27: note = Synthetic
GSCASVCRRVIGVAAGKCINGRCVCYP

SEQ ID NO: 2740 - protein, 27 aa, synthetic construct
  REGION 1..27: note = Synthetic
GSCASVCRRVIGVAAGKCINGRCVCYP

SEQ ID NO: 2741 - protein, 27 aa, synthetic construct
  REGION 1..27: note = Synthetic
GSCASVCRRVIGVAAGKCINGRCVCYP

SEQ ID NO: 2742 - protein, 12 aa, synthetic construct
  REGION 1..12: note = Synthetic
AFLNGLTDYLQN

SEQ ID NO: 2743 - protein, 27 aa, synthetic construct
  REGION 1..27: note = Synthetic
KECWSVCKDLFGVDRGKCMGKKCRCYQ

SEQ ID NO: 2744 - protein, 34 aa, synthetic construct
  REGION 1..34: note = Synthetic
IRKFLETIDDMLDDLARIVSDVGQNAAQRWVVYC

SEQ ID NO: 2745 - protein, 24 aa, synthetic construct
  REGION 1..24: note = Synthetic
KVAKTVAKQAAKQGAKYVVNKQME

SEQ ID NO: 2746 - protein, 24 aa, synthetic construct
  REGION 1..24: note = Synthetic
KVAKTVAKQAAKQGAKYVANKHME

SEQ ID NO: 2747 - protein, 29 aa, synthetic construct
  REGION 1..29: note = Synthetic
GYYGQCDECCKKAGDRAGICEYYKCKCNP

SEQ ID NO: 2748 - protein, 32 aa, synthetic construct
  REGION 1..32: note = Synthetic
VLYQVLSLFKRFLEQQHLQLKNESYEQPTHTE

SEQ ID NO: 2749 - protein, 27 aa, synthetic construct
  REGION 1..27: note = Synthetic
SFYSSMGDLCNNTKSVCCMVPVRMDNI

SEQ ID NO: 2750 - protein, 24 aa, synthetic construct
  REGION 1..24: note = Synthetic
RGCRRCCSYAGEAVEAETKAKPQN

SEQ ID NO: 2751 - protein, 17 aa, synthetic construct
  REGION 1..17: note = Synthetic
FLNTWITFCQSIISKLT

SEQ ID NO: 2752 - protein, 27 aa, synthetic construct
  REGION 1..27: note = Synthetic
NFVHTFIDGVDNVVCKTKDVIFTNISQ

SEQ ID NO: 2753 - protein, 25 aa, synthetic construct
  REGION 1..25: note = Synthetic
GLFSVLGSVAKHLLPHVAPIIAEKL

SEQ ID NO: 2754 - protein, 37 aa, synthetic construct
  REGION 1..37: note = Synthetic
VRECKGFGKSCVPGKNECCSGYACNSRDKWCKVLLGK

SEQ ID NO: 2755 - protein, 28 aa, synthetic construct
  REGION 1..28: note = Synthetic
AQLRELAEKMTDKDPKRLSPSGPDPHHH

SEQ ID NO: 2756 - protein, 33 aa, synthetic construct
  REGION 1..33: note = Synthetic
ARKMVTRALRALQNPSSSPLLSSPQSFSSLTLA

SEQ ID NO: 2757 - protein, 22 aa, synthetic construct
  REGION 1..22: note = Synthetic
NGFLNIIGQAANAVQNAASLCV

SEQ ID NO: 2758 - protein, 22 aa, synthetic construct
  REGION 1..22: note = Synthetic
NGFLNIIGQAANAVQNAASLCV

SEQ ID NO: 2759 - protein, 35 aa, synthetic construct
  REGION 1..35: note = Synthetic
INQMERCASHMTDLVDSVHFPLTDEHKTEAGQQEQ

SEQ ID NO: 2760 - protein, 25 aa, synthetic construct
  REGION 1..25: note = Synthetic
NVLTFLKSLLEVFQKEKMRGMGGKI

SEQ ID NO: 2761 - protein, 27 aa, synthetic construct
  REGION 1..27: note = Synthetic
GSCASVCRKVIGVAAGKCINGRCVCYP

SEQ ID NO: 2762 - protein, 16 aa, synthetic construct
  REGION 1..16: note = Synthetic
DKLASDLTKLLQHLPD

SEQ ID NO: 2763 - protein, 24 aa, synthetic construct
  REGION 1..24: note = Synthetic
NVADSLAKSALNVLRFSVFVTATE

SEQ ID NO: 2764 - protein, 18 aa, synthetic construct
  REGION 1..18: note = Synthetic
VWDMFYELFEGIRKLIFK

SEQ ID NO: 2765 - protein, 42 aa, synthetic construct
  REGION 1..42: note = Synthetic
FGRAGAKFIRFGRSRNTWEDGYASPSVNELYVKRGAKFIRFG

SEQ ID NO: 2766 - protein, 17 aa, synthetic construct
  REGION 1..17: note = Synthetic
FLNKWITFCQSIYSTMT

SEQ ID NO: 2767 - protein, 30 aa, synthetic construct
  REGION 1..30: note = Synthetic
GLAGAISSALDKLKQSQLIKNYAKKLGYPR

SEQ ID NO: 2768 - protein, 22 aa, synthetic construct
  REGION 1..22: note = Synthetic
IVHSWYYFLYSFLRLYNLYVLY

SEQ ID NO: 2769 - protein, 11 aa, synthetic construct
  REGION 1..11: note = Synthetic
ISAISAIANHL

SEQ ID NO: 2770 - protein, 29 aa, synthetic construct
  REGION 1..29: note = Synthetic
EEANDAVDRCNEACRRFCTKEAETVTVVS

SEQ ID NO: 2771 - protein, 14 aa, synthetic construct
  REGION 1..14: note = Synthetic
KWVQKYISDLKLNA

SEQ ID NO: 2772 - protein, 21 aa, synthetic construct
  REGION 1..21: note = Synthetic
GLLGSIFGAGKKIACALSGLC

SEQ ID NO: 2773 - protein, 22 aa, synthetic construct
  REGION 1..22: note = Synthetic
DNVASAWNQALDNVYATIFSKL

SEQ ID NO: 2774 - protein, 16 aa, synthetic construct
  REGION 1..16: note = Synthetic
KVAKKLISHVAKKQLQ

SEQ ID NO: 2775 - protein, 40 aa, synthetic construct
  REGION 1..40: note = Synthetic
RKLYTIMNSFCRRDLVFLLDDCNALEYPIPVTTVLPDRQR

SEQ ID NO: 2776 - protein, 24 aa, synthetic construct
  REGION 1..24: note = Synthetic
VKRVPTIAATLVFFFSNSFLPASR

SEQ ID NO: 2777 - protein, 11 aa, synthetic construct
  REGION 1..11: note = Synthetic
LRKMGGDLNSL

SEQ ID NO: 2778 - protein, 24 aa, synthetic construct
  REGION 1..24: note = Synthetic
KVAKTVAKQAAKQGAKYVVNKQME

SEQ ID NO: 2779 - protein, 24 aa, synthetic construct
  REGION 1..24: note = Synthetic
KVAKTVAKQAAKQGAKYVANKHME

SEQ ID NO: 2780 - protein, 20 aa, synthetic construct
  REGION 1..20: note = Synthetic
ITEFLNKWITFCQSIISTLT

SEQ ID NO: 2781 - protein, 12 aa, synthetic construct
  REGION 1..12: note = Synthetic
FDAFFGAVFAKM

SEQ ID NO: 2782 - protein, 11 aa, synthetic construct
  REGION 1..11: note = Synthetic
INAISAIAHHL

SEQ ID NO: 2783 - protein, 20 aa, synthetic construct
  REGION 1..20: note = Synthetic
ITEFLNKWITFCQSIFSTLT

SEQ ID NO: 2784 - protein, 20 aa, synthetic construct
  REGION 1..20: note = Synthetic
ITEFLNKWITFCQSIFSTLT

SEQ ID NO: 2785 - protein, 20 aa, synthetic construct
  REGION 1..20: note = Synthetic
ITEFLNKWITFCQSIFSTLT

SEQ ID NO: 2786 - protein, 20 aa, synthetic construct
  REGION 1..20: note = Synthetic
ITEFLNKWITFCQSIFSTLT

SEQ ID NO: 2787 - protein, 20 aa, synthetic construct
  REGION 1..20: note = Synthetic
ITEFLNKWITFCQSIFSTLT

SEQ ID NO: 2788 - protein, 30 aa, synthetic construct
  REGION 1..30: note = Synthetic
CSRAGENCYKSGRCCDGLYCKAYVVTCYKP

SEQ ID NO: 2789 - protein, 17 aa, synthetic construct
  REGION 1..17: note = Synthetic
KIFDALDKCLQDAAKVA

SEQ ID NO: 2790 - protein, 25 aa, synthetic construct
  REGION 1..25: note = Synthetic
QECQDCCKKAGHSGGTCMFFKCKCA

SEQ ID NO: 2791 - protein, 18 aa, synthetic construct
  REGION 1..18: note = Synthetic
AKKAVGKCDDFKCKCIKL

SEQ ID NO: 2792 - protein, 20 aa, synthetic construct
  REGION 1..20: note = Synthetic
ITEFLNKWITFCQSIFSTLT

SEQ ID NO: 2793 - protein, 20 aa, synthetic construct
  REGION 1..20: note = Synthetic
ITEFLNKWITFCQSIFSTLT

SEQ ID NO: 2794 - protein, 12 aa, synthetic construct
  REGION 1..12: note = Synthetic
NWCDHLCSCCGS

SEQ ID NO: 2795 - protein, 15 aa, synthetic construct
  REGION 1..15: note = Synthetic
RFLGGILNTITGLLG

SEQ ID NO: 2796 - protein, 28 aa, synthetic construct
  REGION 1..28: note = Synthetic
KHAHSMITSMLSFVNSVVNFGRSFVRNE

SEQ ID NO: 2797 - protein, 20 aa, synthetic construct
  REGION 1..20: note = Synthetic
DIMYQAERALEKLASSFRCE

SEQ ID NO: 2798 - protein, 35 aa, synthetic construct
  REGION 1..35: note = Synthetic
NVAAKAFHRIGRTIRDECCSNPACRVNNPHVCRRR

SEQ ID NO: 2799 - protein, 14 aa, synthetic construct
  REGION 1..14: note = Synthetic
WGECYERIASGISG

SEQ ID NO: 2800 - protein, 17 aa, synthetic construct
  REGION 1..17: note = Synthetic
FTEFIQSFEKVIQKECK

SEQ ID NO: 2801 - protein, 39 aa, synthetic construct
  REGION 1..39: note = Synthetic
IAEAWKGAKECNAKCAALGTTRGGVCQKFLGDLYCCCWD

SEQ ID NO: 2802 - protein, 33 aa, synthetic construct
  REGION 1..33: note = Synthetic
DEIMQGFIRAFRPLPRHLWYLLDLKQMEEPCRF

SEQ ID NO: 2803 - protein, 21 aa, synthetic construct
  REGION 1..21: note = Synthetic
FRSAEDCMRTCGGAIGPRENL

SEQ ID NO: 2804 - protein, 30 aa, synthetic construct
  REGION 1..30: note = Synthetic
VLDNVETALHNAAKAGFKLIKPIEKLIMPK

SEQ ID NO: 2805 - protein, 36 aa, synthetic construct
  REGION 1..36: note = Synthetic
RGCKGFGDSCTPGKNECCPDHACSNKHKWCKVYLGK

SEQ ID NO: 2806 - protein, 22 aa, synthetic construct
  REGION 1..22: note = Synthetic
TQARSCCTRLGRCCHVAKGYSG

SEQ ID NO: 2807 - protein, 22 aa, synthetic construct
  REGION 1..22: note = Synthetic
TQARSCCTRLGRCCHVAKGYSG

SEQ ID NO: 2808 - protein, 22 aa, synthetic construct
  REGION 1..22: note = Synthetic
TQARSCCTRLGRCCHVAKGYSG

SEQ ID NO: 2809 - protein, 22 aa, synthetic construct
  REGION 1..22: note = Synthetic
TQARSCCTRLGRCCHVAKGYSG

SEQ ID NO: 2810 - protein, 42 aa, synthetic construct
  REGION 1..42: note = Synthetic
IFKHGRHAAKHIGHAAVNHYLGEQQDLDKRAVDEDPNVIVFE

SEQ ID NO: 2811 - protein, 42 aa, synthetic construct
  REGION 1..42: note = Synthetic
TEMCRAMDGYLRCSHPIILAKCGSDAWTLVSTVCLSRAKLFF

SEQ ID NO: 2812 - protein, 20 aa, synthetic construct
  REGION 1..20: note = Synthetic
DCCSNVCSTMSYVCQENWSG

SEQ ID NO: 2813 - protein, 19 aa, synthetic construct
  REGION 1..19: note = Synthetic
QEMGQVADYVLEQAKAGWK

SEQ ID NO: 2814 - protein, 19 aa, synthetic construct
  REGION 1..19: note = Synthetic
QEMGQVADYVLEQAKAGWK

SEQ ID NO: 2815 - protein, 17 aa, synthetic construct
  REGION 1..17: note = Synthetic
VGKAAGKCMNGKCKCYP

SEQ ID NO: 2816 - protein, 20 aa, synthetic construct
  REGION 1..20: note = Synthetic
LAKYYSALRHYINLITRQRY

SEQ ID NO: 2817 - protein, 20 aa, synthetic construct
  REGION 1..20: note = Synthetic
LAKYYSALRHYINLITRQRY

SEQ ID NO: 2818 - protein, 20 aa, synthetic construct
  REGION 1..20: note = Synthetic
LAKYYSALRHYINLITRQRY

SEQ ID NO: 2819 - protein, 20 aa, synthetic construct
  REGION 1..20: note = Synthetic
LAKYYSALRHYINLITRQRY

SEQ ID NO: 2820 - protein, 20 aa, synthetic construct
  REGION 1..20: note = Synthetic
LAKYYSALRHYINLITRQRY

SEQ ID NO: 2821 - protein, 26 aa, synthetic construct
  REGION 1..26: note = Synthetic
KYANSCCQNIEDCLYLNVWIPAPKPK

SEQ ID NO: 2822 - protein, 25 aa, synthetic construct
  REGION 1..25: note = Synthetic
QECQDCCKKAGHNGGTCMFFKCKCA

SEQ ID NO: 2823 - protein, 25 aa, synthetic construct
  REGION 1..25: note = Synthetic
QECQDCCKKAGHNGGTCMFFKCKCA

SEQ ID NO: 2824 - protein, 25 aa, synthetic construct
  REGION 1..25: note = Synthetic
QECQDCCKKAGHNGGTCMFFKCKCA

SEQ ID NO: 2825 - protein, 25 aa, synthetic construct
  REGION 1..25: note = Synthetic
QECQDCCKKAGHNGGTCMFFKCKCA

SEQ ID NO: 2826 - protein, 35 aa, synthetic construct
  REGION 1..35: note = Synthetic
GLFRFARGYVQASTHEFNLKTGNAIVEYNCYLLHY

SEQ ID NO: 2827 - protein, 31 aa, synthetic construct; identical to SEQ ID NO: 2654
  REGION 1..31: note = Synthetic

SEQ ID NO: 2828 - protein, 12 aa, synthetic construct
  REGION 1..12: note = Synthetic
CKWVEKAWKGLL

SEQ ID NO: 2829 - protein, 21 aa, synthetic construct
  REGION 1..21: note = Synthetic
TIVEFLNRWITFCQSIISTMT

SEQ ID NO: 2830 - protein, 28 aa, synthetic construct
  REGION 1..28: note = Synthetic
DCYRRFEKGVEKGQICWCIETGVTFSKE

SEQ ID NO: 2831 - protein, 33 aa, synthetic construct; identical to SEQ ID NO: 2732
  REGION 1..33: note = Synthetic

SEQ ID NO: 2832 - protein, 33 aa, synthetic construct
  REGION 1..33: note = Synthetic
CFDCARACMRRGKYIRTCSFERKLCRCSISDIK

SEQ ID NO: 2833 - protein, 18 aa, synthetic construct
  REGION 1..18: note = Synthetic
NGISYIAKSAGSILNFSK

SEQ ID NO: 2834 - protein, 17 aa, synthetic construct
  REGION 1..17: note = Synthetic
LKKCCEGFCGKACMDPK

SEQ ID NO: 2835 - protein, 20 aa, synthetic construct
  REGION 1..20: note = Synthetic
MKKIVEHMAERVEDMKIRKK

SEQ ID NO: 2836 - protein, 33 aa, synthetic construct; identical to SEQ ID NO: 2832
  REGION 1..33: note = Synthetic

SEQ ID NO: 2837 - protein, 15 aa, synthetic construct
  REGION 1..15: note = Synthetic
DFLHELTNFVRYLQK

SEQ ID NO: 2838 - protein, 15 aa, synthetic construct
  REGION 1..15: note = Synthetic
DFLHELTNFVRYLQK

SEQ ID NO: 2839 - protein, 42 aa, synthetic construct
  REGION 1..42: note = Synthetic
FFKKAAHVGKHVGKAALTHYLGDKQELNKRAVDEDPNVIVFE

SEQ ID NO: 2840 - protein, 42 aa, synthetic construct; identical to SEQ ID NO: 2839
  REGION 1..42: note = Synthetic

SEQ ID NO: 2841 - protein, 19 aa, synthetic construct
  REGION 1..19: note = Synthetic
RACQQFLKQCQLRSFALPL

SEQ ID NO: 2842 - protein, 13 aa, synthetic construct
  REGION 1..13: note = Synthetic
GPGLVGGILGGIL

SEQ ID NO: 2843 - protein, 23 aa, synthetic construct
  REGION 1..23: note = Synthetic
AYDDFVKQAQEVQKKLHEAASKQ

SEQ ID NO: 2844 - protein, 30 aa, synthetic construct
  REGION 1..30: note = Synthetic
GAIKDALKGAAKTVAVELLKKAQCKLEKTC

SEQ ID NO: 2845 - protein, 22 aa, synthetic construct
  REGION 1..22: note = Synthetic
NNLKEMLDYLYQMMNMKENTSS

SEQ ID NO: 2846 - protein, 17 aa, synthetic construct
  REGION 1..17: note = Synthetic
GGNCDGIMRQCKCIRQC

SEQ ID NO: 2847 - protein, 11 aa, synthetic construct
  REGION 1..11: note = Synthetic
INAISAIADHF

SEQ ID NO: 2848 - protein, 22 aa, synthetic construct
  REGION 1..22: note = Synthetic
TQARSCCTRLGRCCHVAKGYSG

SEQ ID NO: 2849 - protein, 17 aa, synthetic construct
  REGION 1..17: note = Synthetic
FLNGWITFCQSIISTLT

SEQ ID NO: 2850 - protein, 17 aa, synthetic construct
  REGION 1..17: note = Synthetic
FLNGWITFCQSIISTLT

SEQ ID NO: 2851 - protein, 17 aa, synthetic construct
  REGION 1..17: note = Synthetic
FLNGWITFCQSIISTLT

SEQ ID NO: 2852 - protein, 17 aa, synthetic construct
  REGION 1..17: note = Synthetic
FLNGWITFCQSIISTLT

SEQ ID NO: 2853 - protein, 17 aa, synthetic construct
  REGION 1..17: note = Synthetic
FLNGWITFCQSIISTLT

SEQ ID NO: 2854 - protein, 17 aa, synthetic construct
  REGION 1..17: note = Synthetic
FLNGWITFCQSIISTLT

SEQ ID NO: 2855 - protein, 26 aa, synthetic construct
  REGION 1..26: note = Synthetic
SNFKDLVDSLLQVLNVKERTPQLNQQ

SEQ ID NO: 2856 - protein, 29 aa, synthetic construct
  REGION 1..29: note = Synthetic
EIVNEAVDKCAKACSTVCTKSSMNAVETA

SEQ ID NO: 2857 - protein, 21 aa, synthetic construct
  REGION 1..21: note = Synthetic
SMVSLLKRLLTVTRWKLQITG

SEQ ID NO: 2858 - protein, 16 aa, synthetic construct
  REGION 1..16: note = Synthetic
NVWNCIGGGCSKTCGY

SEQ ID NO: 2859 - protein, 17 aa, synthetic construct
  REGION 1..17: note = Synthetic
NLFASALDTLKCKITGC

SEQ ID NO: 2860 - protein, 25 aa, synthetic construct
  REGION 1..25: note = Synthetic
WLAGCPSGWHNCKKHGPTIGWCCKQ

SEQ ID NO: 2861 - protein, 25 aa, synthetic construct
  REGION 1..25: note = Synthetic
WLAGCPSGWHNCKKHGPTIGWCCKQ

SEQ ID NO: 2862 - protein, 25 aa, synthetic construct
  REGION 1..25: note = Synthetic
WLAGCPSGWHNCKKHGPTIGWCCKQ

SEQ ID NO: 2863 - protein, 25 aa, synthetic construct
  REGION 1..25: note = Synthetic
WLAGCPSGWHNCKKHGPTIGWCCKQ

SEQ ID NO: 2864 - protein, 25 aa, synthetic construct
  REGION 1..25: note = Synthetic
WLAGCPSGWHNCKKHGPTIGWCCKQ

SEQ ID NO: 2865 - protein, 25 aa, synthetic construct
  REGION 1..25: note = Synthetic
WLAGCPSGWHNCKKHGPTIGWCCKQ

SEQ ID NO: 2866 - protein, 25 aa, synthetic construct
  REGION 1..25: note = Synthetic
WLAGCPSGWHNCKKHGPTIGWCCKQ

SEQ ID NO: 2867 - protein, 25 aa, synthetic construct
  REGION 1..25: note = Synthetic
WLAGCPSGWHNCKKHGPTIGWCCKQ

SEQ ID NO: 2868 - protein, 13 aa, synthetic construct
  REGION 1..13: note = Synthetic
KRLRKMGGDLNSP

SEQ ID NO: 2869 - protein, 28 aa, synthetic construct
  REGION 1..28: note = Synthetic
DCYRRFEQGVAKGIQCWCIEEDVTYKGV

SEQ ID NO: 2870 - protein, 18 aa, synthetic construct
  REGION 1..18: note = Synthetic
GLVSECCGTCNVLRNRCV

SEQ ID NO: 2871 - protein, 20 aa, synthetic construct
  REGION 1..20: note = Synthetic
FLQQAYEAFESLANFVSQDD

SEQ ID NO: 2872 - protein, 29 aa, synthetic construct
  REGION 1..29: note = Synthetic
KGATKWDSAVESSWAPVLDFVFSTLKNEL

SEQ ID NO: 2873 - protein, 21 aa, synthetic construct
  REGION 1..21: note = Synthetic
KQAKAIIKKVQRKNSEKYKNI

SEQ ID NO: 2874 - protein, 36 aa, synthetic construct
  REGION 1..36: note = Synthetic
ECDRVAANCFHQNKNTYNKNYRFLSSSRCRQTSEQC

SEQ ID NO: 2875 - protein, 36 aa, synthetic construct; identical to SEQ ID NO: 2874
  REGION 1..36: note = Synthetic

SEQ ID NO: 2876 - protein, 15 aa, synthetic construct
  REGION 1..15: note = Synthetic
ELLRRCLDNCEKEHD

SEQ ID NO: 2877 - protein, 18 aa, synthetic construct
  REGION 1..18: note = Synthetic
GALQNLLKVASCKLDKTC

SEQ ID NO: 2878 - protein, 34 aa, synthetic construct
  REGION 1..34: note = Synthetic
KGKQMLKEYANKVLSPEEEAPAAVPAGAPERRRR

SEQ ID NO: 2879 - protein, 23 aa, synthetic construct
  REGION 1..23: note = Synthetic
GRALGKFLQDILWEEVKEAPADK

SEQ ID NO: 2880 - protein, 23 aa, synthetic construct
  REGION 1..23: note = Synthetic
GRALGKFLQDILWEEVKEAPANK

SEQ ID NO: 2881 - protein, 26 aa, synthetic construct
  REGION 1..26: note = Synthetic
IKEAFEDFVKQAEAVQKKVHDAATKQ

SEQ ID NO: 2882 - protein, 19 aa, synthetic construct
  REGION 1..19: note = Synthetic
IIKAAQEAWKIIQQIPRPP

SEQ ID NO: 2883 - protein, 21 aa, synthetic construct
  REGION 1..21: note = Synthetic
TSLKDFLESLKSIMQMDYSQY

SEQ ID NO: 2884 - protein, 23 aa, synthetic construct
  REGION 1..23: note = Synthetic
HAFEFMQRALQDLRKTAYSLDSR

SEQ ID NO: 2885 - protein, 37 aa, synthetic construct
  REGION 1..37: note = Synthetic
NCAKKIVSDGNGMNAWVAWRNRCKGTDVQAWIRGCRL

SEQ ID NO: 2886 - protein, 42 aa, synthetic construct
  REGION 1..42: note = Synthetic
CRKLFGGCVGDGDCCLHLGCKTRKLPPFADPYCAWDWTFGRK

SEQ ID NO: 2887 - protein, 25 aa, synthetic construct
  REGION 1..25: note = Synthetic
IKKAGTELVNFLSYFVELGTQPATQ

SEQ ID NO: 2888 - protein, 25 aa, synthetic construct
  REGION 1..25: note = Synthetic
IKKAGTELVNFLSYFVELGTQPATQ

SEQ ID NO: 2889 - protein, 20 aa, synthetic construct
  REGION 1..20: note = Synthetic
FYDPAKRCCRTCFGCTPCCG

SEQ ID NO: 2890 - protein, 18 aa, synthetic construct
  REGION 1..18: note = Synthetic
LQSFLELAYRVLRYLAEP

SEQ ID NO: 2891 - protein, 25 aa, synthetic construct
  REGION 1..25: note = Synthetic
IKKAGTELVNFLSYFMELGTQPATQ

SEQ ID NO: 2892 - protein, 25 aa, synthetic construct
  REGION 1..25: note = Synthetic
IKKAGTELVNFLSYFMELGTQPATQ

SEQ ID NO: 2893 - protein, 21 aa, synthetic construct
  REGION 1..21: note = Synthetic
LAAFFGLATGLFLGLKAIKLI

SEQ ID NO: 2894 - protein, 25 aa, synthetic construct
  REGION 1..25: note = Synthetic
NMLTFLKSLLEVFQKENVRKMRDRV

SEQ ID NO: 2895 - protein, 40 aa, synthetic construct
  REGION 1..40: note = Synthetic
VGNFVHGFSHVFGDDQQDNGKFYGHYAEDNGKHWYDTGDQ

SEQ ID NO: 2896 - protein, 28 aa, synthetic construct
  REGION 1..28: note = Synthetic
KGGCNRGEQVYGTCSGRLLFCCRRRHRH

SEQ ID NO: 2897 - protein, 20 aa, synthetic construct
  REGION 1..20: note = Synthetic
TAFRQIGNCGHFKVRCCKIR

SEQ ID NO: 2898 - protein, 38 aa, synthetic construct
  REGION 1..38: note = Synthetic
RACRELLGGCSKDSDCCAHLECRKKWPYHCVWDWTIGK

SEQ ID NO: 2899 - protein, 41 aa, synthetic construct
  REGION 1..41: note = Synthetic
RACRELLGGCSKDSDCCAHLECRKKWPYHCVWDWTFGNEKS

SEQ ID NO: 2900 - protein, 28 aa, synthetic construct
  REGION 1..28: note = Synthetic
EAMKEAVERCNNACSEVCTKGSYAVVTA

SEQ ID NO: 2901 - protein, 31 aa, synthetic construct
  REGION 1..31: note = Synthetic
GNKFFRGCAAACPKAEHNEVVRCCARDKCNL

SEQ ID NO: 2902 - protein, 34 aa, synthetic construct
  REGION 1..34: note = Synthetic
LMTSLLEKLQEAVSDGRYVLRIKGIIKNKIKTLK

SEQ ID NO: 2903 - protein, 29 aa, synthetic construct
  REGION 1..29: note = Synthetic
RRVEQFLDYLEEFLRTINIEWNTEWTVES

SEQ ID NO: 2904 - protein, 24 aa, synthetic construct
  REGION 1..24: note = Synthetic
DFITLIYYVVEDVNSLMRGTHGFH

SEQ ID NO: 2905 - protein, 42 aa, synthetic construct
  REGION 1..42: note = Synthetic
CLKNAARGIKGLNAGNAASIPSKCGVSVPYTISASIDCSRVS

SEQ ID NO: 2906 - protein, 42 aa, synthetic construct; identical to SEQ ID NO: 2905
  REGION 1..42: note = Synthetic

SEQ ID NO: 2907 - protein, 21 aa, synthetic construct
  REGION 1..21: note = Synthetic
KAVEFLNKWITFCQSIYSTMT

SEQ ID NO: 2908 - protein, 21 aa, synthetic construct
  REGION 1..21: note = Synthetic
KAVEFLNKWITFCQSIYSTMT

SEQ ID NO: 2909 - protein, 21 aa, synthetic construct
  REGION 1..21: note = Synthetic
KAVEFLNKWITFCQSIYSTMT

SEQ ID NO: 2910 - protein, 21 aa, synthetic construct
  REGION 1..21: note = Synthetic
KAVEFLNKWITFCQSIYSTMT

SEQ ID NO: 2911 - protein, 21 aa, synthetic construct
  REGION 1..21: note = Synthetic
KAVEFLNKWITFCQSIYSTMT

SEQ ID NO: 2912 - protein, 20 aa, synthetic construct
  REGION 1..20: note = Synthetic
NGCRRCCSYAGEAVQTQPGH

SEQ ID NO: 2913 - protein, 40 aa, synthetic construct
  REGION 1..40: note = Synthetic
MLDGLNDYCTGVTPDCPRNPNKGESDELEWSAAATGSVLM

SEQ ID NO: 2914 - protein, 36 aa, synthetic construct
  REGION 1..36: note = Synthetic
ECDRVAANCFHQNKNTYNKEYKFLSSSKCRQRSEQC

SEQ ID NO: 2915 - protein, 18 aa, synthetic construct
  REGION 1..18: note = Synthetic
SAGKTALNKIACKIDKTC

SEQ ID NO: 2916 - protein, 37 aa, synthetic construct
  REGION 1..37: note = Synthetic
NCAKKIVSDGNGMNAWVAWRKHCKGTDVNVWIRGCRL

SEQ ID NO: 2917 - protein, 20 aa, synthetic construct
  REGION 1..20: note = Synthetic
RSCRRCCSYAGEAVQTQPGN

SEQ ID NO: 2918 - protein, 20 aa, synthetic construct
  REGION 1..20: note = Synthetic
RSCRRCCSYAGEAVQTQPGN

SEQ ID NO: 2919 - protein, 21 aa, synthetic construct
  REGION 1..21: note = Synthetic
KAVEFLNKWITFCQSIYSTMT

SEQ ID NO: 2920 - protein, 21 aa, synthetic construct
  REGION 1..21: note = Synthetic
KAVEFLNKWITFCQSIYSTMT

SEQ ID NO: 2921 - protein, 21 aa, synthetic construct
  REGION 1..21: note = Synthetic
KAVEFLNKWITFCQSIYSTMT

SEQ ID NO: 2922 - protein, 21 aa, synthetic construct
  REGION 1..21: note = Synthetic
KAVEFLNKWITFCQSIYSTMT

SEQ ID NO: 2923 - protein, 21 aa, synthetic construct
  REGION 1..21: note = Synthetic
KAVEFLNKWITFCQSIYSTMT

SEQ ID NO: 2924 - protein, 11 aa, synthetic construct
  REGION 1..11: note = Synthetic
TCVASIVRQAA

SEQ ID NO: 2925 - protein, 35 aa, synthetic construct
  REGION 1..35: note = Synthetic
EEIIRLYSNGLRLQQTMSALICLLTFLLELCCWQL

SEQ ID NO: 2926 - protein, 17 aa, synthetic construct
  REGION 1..17: note = Synthetic
FLNKWITFCQSIYSTMT

SEQ ID NO: 2927 - protein, 22 aa, synthetic construct
  REGION 1..22: note = Synthetic
SNFKELVDSLLQVLNVKEGTPS

SEQ ID NO: 2928 - protein, 34 aa, synthetic construct
  REGION 1..34: note = Synthetic
LANFISSLTAGGLVVLTIAVALIVISRTDRVTRF

SEQ ID NO: 2929 - protein, 20 aa, synthetic construct
  REGION 1..20: note = Synthetic
IFKTLLSAVGSALSSSGGQE

SEQ ID NO: 2930 - protein, 34 aa, synthetic construct
  REGION 1..34: note = Synthetic
KRFGKKYPRGCAATCPEAKPHEIVECCSTDKCNK

SEQ ID NO: 2931 - protein, 34 aa, synthetic construct; identical to SEQ ID NO: 2930
  REGION 1..34: note = Synthetic

SEQ ID NO: 2932 - protein, 26 aa, synthetic construct
  REGION 1..26: note = Synthetic
RGLWSTIKNVGKEAAIAAGKAALGAL

SEQ ID NO: 2933 - protein, 29 aa, synthetic construct
  REGION 1..29: note = Synthetic
RGLWSTIKNVGKEAAIAAGKAALGALGEQ

SEQ ID NO: 2934 - protein, 29 aa, synthetic construct
  REGION 1..29: note = Synthetic
RGLWSTIKNVGKEAAIAAGKAVLGSLGEQ

SEQ ID NO: 2935 - protein, 32 aa, synthetic construct
  REGION 1..32: note = Synthetic
GKRGLSDLYDLDEMFDGEISQADIDFLKELMR

SEQ ID NO: 2936 - protein, 25 aa, synthetic construct
  REGION 1..25: note = Synthetic
WLAGCPSGWHNCKSSGPNIGWCCKK

SEQ ID NO: 2937 - protein, 25 aa, synthetic construct
  REGION 1..25: note = Synthetic
RKVEQFLDYLEDFLRTVNTEWTIES

SEQ ID NO: 2938 - protein, 19 aa, synthetic construct
  REGION 1..19: note = Synthetic
KWVQDYMNHLDQKSQAQKP

SEQ ID NO: 2939 - protein, 22 aa, synthetic construct
  REGION 1..22: note = Synthetic
AVDVLSRLVNRATSLGILQQLH

SEQ ID NO: 2940 - protein, 18 aa, synthetic construct
  REGION 1..18: note = Synthetic
AKKAVGKCDDFKCNCIKL

SEQ ID NO: 2941 - protein, 17 aa, synthetic construct
  REGION 1..17: note = Synthetic
LESILQGFPRMKLSAEA

SEQ ID NO: 2942 - protein, 26 aa, synthetic construct
  REGION 1..26: note = Synthetic
KRFLSTLLNVASKVVPTLFCKITKKC

SEQ ID NO: 2943 - protein, 15 aa, synthetic construct
  REGION 1..15: note = Synthetic
QCCANFCRKATSTCM

SEQ ID NO: 2944 - protein, 16 aa, synthetic construct
  REGION 1..16: note = Synthetic
HHITTVMEHLIKELYG

SEQ ID NO: 2945 - protein, 20 aa, synthetic construct
  REGION 1..20: note = Synthetic
LFKTLLSAVGSALSSSGGQE

SEQ ID NO: 2946 - protein, 19 aa, synthetic construct
  REGION 1..19: note = Synthetic
GREYEEYAQKVHSGLPFIE

SEQ ID NO: 2947 - protein, 19 aa, synthetic construct
  REGION 1..19: note = Synthetic
GREYEEYAQKVHSGLPFIE

SEQ ID NO: 2948 - protein, 22 aa, synthetic construct
  REGION 1..22: note = Synthetic
LLNSMRTFISDLEEWDREQYDR

SEQ ID NO: 2949 - protein, 30 aa, synthetic construct
  REGION 1..30: note = Synthetic
THLSELLEEVCKSMSDYALHLDPDTQQKKY

SEQ ID NO: 2950 - protein, 20 aa, synthetic construct
  REGION 1..20: note = Synthetic
FIGTALGIASAIPAIVKLFK

SEQ ID NO: 2951 - protein, 32 aa, synthetic construct
  REGION 1..32: note = Synthetic
EYFIKKIRRVVENVAKAVVINKAVGAVAGTIG

SEQ ID NO: 2952 - protein, 27 aa, synthetic construct
  REGION 1..27: note = Synthetic
MLDGLNDYCTGISSDCPRNRYKGKEDD

SEQ ID NO: 2953 - protein, 15 aa, synthetic construct
  REGION 1..15: note = Synthetic
LKKVKTLLNDIRRMM

SEQ ID NO: 2954 - protein, 18 aa, synthetic construct
  REGION 1..18: note = Synthetic
DKIIAVAKEMGKAGLQAA

SEQ ID NO: 2955 - protein, 20 aa, synthetic construct
  REGION 1..20: note = Synthetic
RGCSRCCSYAGEAVQTQPGH

SEQ ID NO: 2956 - protein, 21 aa, synthetic construct
  REGION 1..21: note = Synthetic
RRVQRCIERLEQNSQPRTYKQ

SEQ ID NO: 2957 - protein, 37 aa, synthetic construct
  REGION 1..37: note = Synthetic
NKAAGAINKFVADKIGVTPSQAASMTLDEIVDAMYYD

SEQ ID NO: 2958 - protein, 20 aa, synthetic construct
  REGION 1..20: note = Synthetic
LARYYTALRHYINLITRQRY

SEQ ID NO: 2959 - protein, 21 aa, synthetic construct
  REGION 1..21: note = Synthetic
RIAHECCKEGCTYDDILDYCA

SEQ ID NO: 2960 - protein, 42 aa, synthetic construct
  REGION 1..42: note = Synthetic
VWDWIKSAAKKIWSSEPVSQLKGQVLNAAKNYVAEKIGATPT

SEQ ID NO: 2961 - protein, 11 aa, synthetic construct
  REGION 1..11: note = Synthetic
ACGGKYFKCGR

SEQ ID NO: 2962 - protein, 20 aa, synthetic construct
  REGION 1..20: note = Synthetic
RGCSRCCSYAGEAVQTQPGH

SEQ ID NO: 2963 - protein, 12 aa, synthetic construct
  REGION 1..12: note = Synthetic
DNGKHWYDTGDQ

SEQ ID NO: 2964 - protein, 20 aa, synthetic construct
  REGION 1..20: note = Synthetic
LAKYYTALRHYINLITRQRY

SEQ ID NO: 2965 - protein, 20 aa, synthetic construct
  REGION 1..20: note = Synthetic
LAKYYTALRHYINLITRQRY

SEQ ID NO: 2966 - protein, 20 aa, synthetic construct
  REGION 1..20: note = Synthetic
LAKYYTALRHYINLITRQRY

SEQ ID NO: 2967 - protein, 21 aa, synthetic construct
  REGION 1..21: note = Synthetic
NAVEFLNKWITFCQSIYSTMT

SEQ ID NO: 2968 - protein, 42 aa, synthetic construct
  REGION 1..42: note = Synthetic
IQGAARALGSRLNAGRAARLPGACRVRISYPISARTNCNTVR

SEQ ID NO: 2969 - protein, 17 aa, synthetic construct
  REGION 1..17: note = Synthetic
FLNKWITFCQSIYSTLT

SEQ ID NO: 2970 - protein, 33 aa, synthetic construct
  REGION 1..33: note = Synthetic
SVNNFCQYFIYSLKQKDNFFMIIFTMLNCLIII

SEQ ID NO: 2971 - protein, 42 aa, synthetic construct
  REGION 1..42: note = Synthetic
CHRACGSCCAKCQCVPPGTSGNTASCPCYASIRTHGNKLKCP

SEQ ID NO: 2972 - protein, 39 aa, synthetic construct
  REGION 1..39: note = Synthetic
CEKGFQCCSSFCGIVCSSETFQKRNRIKHKGSEVIMPAN

SEQ ID NO: 2973 - protein, 22 aa, synthetic construct
  REGION 1..22: note = Synthetic
ARMATKLGRKVLNKRRQKGENS

SEQ ID NO: 2974 - protein, 14 aa, synthetic construct
  REGION 1..14: note = Synthetic
EAVKKLLEALSHLV

SEQ ID NO: 2975 - protein, 27 aa, synthetic construct
  REGION 1..27: note = Synthetic
ASMEKLMERGFNESMRLSPGGPDPRHH

SEQ ID NO: 2976 - protein, 23 aa, synthetic construct
  REGION 1..23: note = Synthetic
LPAIVGAAGQFLPKIFCAISKKC

SEQ ID NO: 2977 - protein, 42 aa, synthetic construct
  REGION 1..42: note = Synthetic
ITQAVACAKRVVSDPNGIRAWVAWRAHCENQDVSQYVRNCGV

SEQ ID NO: 2978 - protein, 42 aa, synthetic construct; identical to SEQ ID NO: 2977
  REGION 1..42: note = Synthetic

SEQ ID NO: 2979 - protein, 34 aa, synthetic construct
  REGION 1..34: note = Synthetic
TGVFNIIKTIGKEAGMDVIRAGIDTISCKIKGEC

SEQ ID NO: 2980 - protein, 17 aa, synthetic construct
  REGION 1..17: note = Synthetic
LFDVIKKVASVIGLASP

SEQ ID NO: 2981 - protein, 22 aa, synthetic construct
  REGION 1..22: note = Synthetic
GDDMNDYCTGITPDCPRNPYKD

SEQ ID NO: 2982 - protein, 22 aa, synthetic construct
  REGION 1..22: note = Synthetic
RGLLSGILGAGKNIVCGLSGLC

SEQ ID NO: 2983 - protein, 22 aa, synthetic construct
  REGION 1..22: note = Synthetic
RGLLSGILGAGKNIVCGLSGLC

SEQ ID NO: 2984 - protein, 20 aa, synthetic construct
  REGION 1..20: note = Synthetic
ITEFLNKWITFCQSIFSTLT

SEQ ID NO: 2985 - protein, 19 aa, synthetic construct
  REGION 1..19: note = Synthetic
RLYELLHGAGNHAAGILTL

SEQ ID NO: 2986 - protein, 18 aa, synthetic construct
  REGION 1..18: note = Synthetic
KWIQEYLEKALNKKAKKT

SEQ ID NO: 2987 - protein, 20 aa, synthetic construct
  REGION 1..20: note = Synthetic
MAHYAAELRRYINMLTRPRY

SEQ ID NO: 2988 - protein, 20 aa, synthetic construct
  REGION 1..20: note = Synthetic
NGCRRCCSYAGEAVQTQPGH

SEQ ID NO: 2989 - protein, 14 aa, synthetic construct
  REGION 1..14: note = Synthetic
EAVKKLLEALSHLV

SEQ ID NO: 2990 - protein, 29 aa, synthetic construct
  REGION 1..29: note = Synthetic
EEANHAVDRCNEACRRFCTKEAETVTAVS

SEQ ID NO: 2991 - protein, 35 aa, synthetic construct
  REGION 1..35: note = Synthetic
CDKIAANCFAANLKTYNKKLRFYNKFRCRGAAPAC

SEQ ID NO: 2992 - protein, 17 aa, synthetic construct
  REGION 1..17: note = Synthetic
LSDVIDEYVSNVQMVGK

SEQ ID NO: 2993 - protein, 17 aa, synthetic construct
  REGION 1..17: note = Synthetic
LSDVIDEYVSNVQMVGK

SEQ ID NO: 2994 - protein, 41 aa, synthetic construct
  REGION 1..41: note = Synthetic
VTKYCNQVTGALVAGLIALITYIILLLHSIYTFLNPLLEKA

SEQ ID NO: 2995 - protein, 21 aa, synthetic construct
  REGION 1..21: note = Synthetic
ACNAALAKLEKIADDINDDDD

SEQ ID NO: 2996 - protein, 20 aa, synthetic construct
  REGION 1..20: note = Synthetic
LNRYYASLRHYLNLVTRQRY

SEQ ID NO: 2997 - protein, 42 aa, synthetic construct
  REGION 1..42: note = Synthetic
YCGKGPKYCGRASTTVDHQADVAATKTAKNPTDAKLAGAGSP

SEQ ID NO: 2998 - protein, 33 aa, synthetic construct
  REGION 1..33: note = Synthetic
KNWSEFVRSMLRAMSKVAAYILQEKHNHDDDDE

SEQ ID NO: 2999 - protein, 24 aa, synthetic construct
  REGION 1..24: note = Synthetic
AVSQCTNACSNFCTKGSAKAVETA

SEQ ID NO: 3000 - protein, 22 aa, synthetic construct
  REGION 1..22: note = Synthetic
WFDPVKRCCSRYCWKCIPCCPY

SEQ ID NO: 3001 - protein, 20 aa, synthetic construct
  REGION 1..20: note = Synthetic
NGCSRCCSYAGEAVQTQPGH

SEQ ID NO: 3002 - protein, 12 aa, synthetic construct
  REGION 1..12: note = Synthetic
CGWVQDAYKGIV

SEQ ID NO: 3003 - protein, 32 aa, synthetic construct
  REGION 1..32: note = Synthetic
KKLGDSAISCGETCFKFKCYTPRCSCSYPVCK

SEQ ID NO: 3004 - protein, 17 aa, synthetic construct
  REGION 1..17: note = Synthetic
LNALLHHGLNCAKGVLA

SEQ ID NO: 3005 - protein, 19 aa, synthetic construct
  REGION 1..19: note = Synthetic
FEQLVEKIKSLWYTRVLGY

SEQ ID NO: 3006 - protein, 23 aa, synthetic construct
  REGION 1..23: note = Synthetic
KGYHGCSRCCSYAGEAVQTQSGH

SEQ ID NO: 3007 - protein, 14 aa, synthetic construct
  REGION 1..14: note = Synthetic
GMNAIENMFSFCFR

SEQ ID NO: 3008 - protein, 42 aa, synthetic construct
  REGION 1..42: note = Synthetic
ACRCLQSAAKGVNPSLASGLPGKCGVSIPYPISTSTNCATIK

SEQ ID NO: 3009 - protein, 20 aa, synthetic construct
  REGION 1..20: note = Synthetic
MARYYSALRHYINLITRQRY

SEQ ID NO: 3010 - protein, 20 aa, synthetic construct
  REGION 1..20: note = Synthetic
MARYYSALRHYINLITRQRY

SEQ ID NO: 3011 - protein, 20 aa, synthetic construct
  REGION 1..20: note = Synthetic
MARYYSALRHYINLITRQRY

SEQ ID NO: 3012 - protein, 21 aa, synthetic construct
  REGION 1..21: note = Synthetic
KNINEFLKSFIHIVQMFINPS

SEQ ID NO: 3013 - protein, 20 aa, synthetic construct
  REGION 1..20: note = Synthetic
NDMCYKLTSLLSRCYPKKSE

SEQ ID NO: 3014 - protein, 16 aa, synthetic construct
  REGION 1..16: note = Synthetic
WNRCFARIANGISAGL

SEQ ID NO: 3015 - protein, 42 aa, synthetic construct
  REGION 1..42: note = Synthetic
CYGAAGTCARIVCDCDRTAALCFGNSEYIERHKNIDTKRHCR

SEQ ID NO: 3016 - protein, 14 aa, synthetic construct
  REGION 1..14: note = Synthetic
EAVKKLLEALSHLV

SEQ ID NO: 3017 - protein, 20 aa, synthetic construct
  REGION 1..20: note = Synthetic
MAKYYSALRHYINLITRQRY

SEQ ID NO: 3018 - protein, 20 aa, synthetic construct
  REGION 1..20: note = Synthetic
MAKYYSALRHYINLITRQRY

SEQ ID NO: 3019 - protein, 18 aa, synthetic construct
  REGION 1..18: note = Synthetic
LKCCKSMCGKVCLTPVKA

SEQ ID NO: 3020 - protein, 20 aa, synthetic construct
  REGION 1..20: note = Synthetic
SLCSTLLNHCMTLLNCCAWL

SEQ ID NO: 3021 - protein, 20 aa, synthetic construct
  REGION 1..20: note = Synthetic
KAERMVRRAAKQAEEEADQR

SEQ ID NO: 3022 - protein, 36 aa, synthetic construct
  REGION 1..36: note = Synthetic
GEGLCDNLCKYEGAISGVCVSDPHRCLCRNRKPGCS

SEQ ID NO: 3023 - protein, 20 aa, synthetic construct
  REGION 1..20: note = Synthetic
MNKYLTALRHYINLVTRQRY

SEQ ID NO: 3024 - protein, 23 aa, synthetic construct
  REGION 1..23: note = Synthetic
KALSSLCEIASEACSAWFPLPDN

SEQ ID NO: 3025 - protein, 38 aa, synthetic construct
  REGION 1..38: note = Synthetic
SWIAGGVERIERGCSLTCPDIKYNGKYIYCCTRDNCNA

SEQ ID NO: 3026 - protein, 33 aa, synthetic construct
  REGION 1..33: note = Synthetic
RGCKGFGDSCTPEKNECCPNYACSSKHKWCKSI

SEQ ID NO: 3027 - protein, 40 aa, synthetic construct
  REGION 1..40: note = Synthetic
RGIRPVGRFGRRRATPRDVTGLGQLSCLPLDGRTKFSQRG

SEQ ID NO: 3028 - protein, 14 aa, synthetic construct
  REGION 1..14: note = Synthetic
EDLCQIADRMIERL

SEQ ID NO: 3029 - protein, 34 aa, synthetic construct
  REGION 1..34: note = Synthetic
TELMTYARDIFQYAGCLIDFEVINIDPSSSGNDD

SEQ ID NO: 3030 - protein, 12 aa, synthetic construct
  REGION 1..12: note = Synthetic
VGGGGGGGSRVI

SEQ ID NO: 3031 - protein, 22 aa, synthetic construct
  REGION 1..22: note = Synthetic
EAGLEALRTGIDVIGCKIKGEC

SEQ ID NO: 3032 - protein, 22 aa, synthetic construct
  REGION 1..22: note = Synthetic
EAGLEALRTGIDVIGCKIKGEC

SEQ ID NO: 3033 - protein, 36 aa, synthetic construct
  REGION 1..36: note = Synthetic
ECDRVAANCFHQNQNTYNKNYKFLSSSRCRQTSEQC

SEQ ID NO: 3034 - protein, 42 aa, synthetic construct
  REGION 1..42: note = Synthetic
KAVAQVKNAVSKLQEKGVYKAMSEFDIFIDYIEAYMTMKTQN

SEQ ID NO: 3035 - protein, 42 aa, synthetic construct; identical to SEQ ID NO: 2977
  REGION 1..42: note = Synthetic

SEQ ID NO: 3036 - protein, 25 aa, synthetic construct
  REGION 1..25: note = Synthetic
GLFSVLGSVAKHLLPHVVPVIAEKL

SEQ ID NO: 3037 - protein, 36 aa, synthetic construct
  REGION 1..36: note = Synthetic
QCDKAAAECFARNKKTYSLKYQFYPNMFCKGKKPKC

SEQ ID NO: 3038 - protein, 27 aa, synthetic construct
  REGION 1..27: note = Synthetic
CANTLMEVWDTLVKYNDGDAKVNKPWL

SEQ ID NO: 3039 - protein, 21 aa, synthetic construct
  REGION 1..21: note = Synthetic
KDIKEFLQSFIRIVQMFINTS

SEQ ID NO: 3040 - protein, 19 aa, synthetic construct
  REGION 1..19: note = Synthetic
AKNALQKFIEEMKKIKNRP

SEQ ID NO: 3041 - protein, 20 aa, synthetic construct
  REGION 1..20: note = Synthetic
TFTQFWSRLCHHAQSLQCLE

SEQ ID NO: 3042 - protein, 36 aa, synthetic construct
  REGION 1..36: note = Synthetic
RDCAGYMRECKEKLCCSGYVCSSRWKWRVLPAPWRR

SEQ ID NO: 3043 - protein, 36 aa, synthetic construct
  REGION 1..36: note = Synthetic
RDCAGYMRECKEKLCCSGYVRSSRWKWCVLPAPWRR

SEQ ID NO: 3044 - protein, 34 aa, synthetic construct
  REGION 1..34: note = Synthetic
FQGCLGTCFNYTKTNNNMVKEHKCCDHQNLCNKP

SEQ ID NO: 3045 - protein, 14 aa, synthetic construct
  REGION 1..14: note = Synthetic
EKLKRVASTFLQKN

SEQ ID NO: 3046 - protein, 29 aa, synthetic construct
  REGION 1..29: note = Synthetic
ADKLTDFINSVMDQLATLGFRNGVDAGLV

SEQ ID NO: 3047 - protein, 20 aa, synthetic construct
  REGION 1..20: note = Synthetic
NGCSRCCSYAGEAVQTQPGH

SEQ ID NO: 3048 - protein, 41 aa, synthetic construct
  REGION 1..41: note = Synthetic
KECLHTCDTCAKAQGKRGNCASEMLKSTRPQGWAVAAFQMG

SEQ ID NO: 3049 - protein, 25 aa, synthetic construct
  REGION 1..25: note = Synthetic
ITTVVRVITDVIDAAVAAGKIFKKP

SEQ ID NO: 3050 - protein, 18 aa, synthetic construct
  REGION 1..18: note = Synthetic
AKKAVGKCDDFKCNCIKL

SEQ ID NO: 3051 - protein, 27 aa, synthetic construct
  REGION 1..27: note = Synthetic
SARKLLQDIMNRQQGERNQEQGAKVRL

SEQ ID NO: 3052 - protein, 27 aa, synthetic construct
  REGION 1..27: note = Synthetic
SARKLLQDIMNRQQGERNQEQGAKVRL

SEQ ID NO: 3053 - protein, 15 aa, synthetic construct
  REGION 1..15: note = Synthetic
IDYIRDICQKVLKEL

SEQ ID NO: 3054 - protein, 24 aa, synthetic construct
  REGION 1..24: note = Synthetic
YKCGARIGRNCFCLQKGVIYKREN

SEQ ID NO: 3055 - protein, 23 aa, synthetic construct
  REGION 1..23: note = Synthetic
SFPSVLSSCCKGMSHGQHFHTHT

SEQ ID NO: 3056 - protein, 12 aa, synthetic construct
  REGION 1..12: note = Synthetic
INAVSTLVHHFG

SEQ ID NO: 3057 - protein, 12 aa, synthetic construct
  REGION 1..12: note = Synthetic
INAVSTLVHHFG

SEQ ID NO: 3058 - protein, 16 aa, synthetic construct
  REGION 1..16: note = Synthetic
KLLKTVAKQAAKKQME

SEQ ID NO: 3059 - protein, 23 aa, synthetic construct
  REGION 1..23: note = Synthetic
MGGLIKAATKALPAAFCAITKKC

SEQ ID NO: 3060 - protein, 26 aa, synthetic construct
  REGION 1..26: note = Synthetic
VASGINTWAKDLKDIAEKEEREKASL

SEQ ID NO: 3061 - protein, 42 aa, synthetic construct
  REGION 1..42: note = Synthetic
KAVEQVMNAFSKLQEKGVYKAMSEFDIFINYIEAYMTMKIQN

SEQ ID NO: 3062 - protein, 20 aa, synthetic construct
  REGION 1..20: note = Synthetic
RGCSRCCSYAGEAVQTQPGH

SEQ ID NO: 3063 - protein, 23 aa, synthetic construct
  REGION 1..23: note = Synthetic
DHVLDLLEDACDGLYDHLVSSKK

SEQ ID NO: 3064 - protein, 39 aa, synthetic construct
  REGION 1..39: note = Synthetic
GGGGGGGARRMKGLAKKAMGKGCFGHKLDRIGSTSGLGC

SEQ ID NO: 3065 - protein, 27 aa, synthetic construct
  REGION 1..27: note = Synthetic
VRSAGTSLVNFFSSLMNLEEKPAPAAK

SEQ ID NO: 3066 - protein, 35 aa, synthetic construct
  REGION 1..35: note = Synthetic
ECDRVAATCFRDNLNTYDKKYRKYPPSQCTGTEQC

SEQ ID NO: 3067 - protein, 22 aa, synthetic construct
  REGION 1..22: note = Synthetic
RLGRQLHNIVDKPRQNFNDPRF

SEQ ID NO: 3068 - protein, 31 aa, synthetic construct
  REGION 1..31: note = Synthetic
AWGLWSSVVKSWGFRAGETEAPISALSSAHA

SEQ ID NO: 3069 - protein, 26 aa, synthetic construct
  REGION 1..26: note = Synthetic
CWGPCTGGFRQIGTCGLPRVRCCKKK

SEQ ID NO: 3070 - protein, 17 aa, synthetic construct
  REGION 1..17: note = Synthetic
RELPKVCRNIFSRVSLI

SEQ ID NO: 3071 - protein, 35 aa, synthetic construct
  REGION 1..35: note = Synthetic
VKRFKKFFRKLKKSVKKRVKKFFKKPRVIGVTIPF

SEQ ID NO: 3072 - protein, 29 aa, synthetic construct
  REGION 1..29: note = Synthetic
DCYGRYKSGARRGRNCFCLQKGVIYKREN

SEQ ID NO: 3073 - protein, 32 aa, synthetic construct
  REGION 1..32: note = Synthetic
SKIPELFRDFARSLSAPIIDSFDEAIETYKLF

SEQ ID NO: 3074 - protein, 28 aa, synthetic construct
  REGION 1..28: note = Synthetic
DNVEHAWNDAFDKMYYVIFANLDGHPVA

SEQ ID NO: 3075 - protein, 25 aa, synthetic construct
  REGION 1..25: note = Synthetic
QECQDCCKNAGHNGGTCMFFKCKCA

SEQ ID NO: 3076 - protein, 17 aa, synthetic construct
  REGION 1..17: note = Synthetic
FLNKWITFCQSIYSTLT

SEQ ID NO: 3077 - protein, 25 aa, synthetic construct
  REGION 1..25: note = Synthetic
VKKAGTDLVNFLSYFVELRTQPATQ

SEQ ID NO: 3078 - protein, 26 aa, synthetic construct
  REGION 1..26: note = Synthetic
QECQDCCKNAGHNGGTCVYYKCKCNP

SEQ ID NO: 3079 - protein, 20 aa, synthetic construct
  REGION 1..20: note = Synthetic
IAQYFSALRHYINLVTRQRY

SEQ ID NO: 3080 - protein, 32 aa, synthetic construct
  REGION 1..32: note = Synthetic
QRCNRWCHNGCGNGKGGYYKSMSHGGQCHYYC

SEQ ID NO: 3081 - protein, 26 aa, synthetic construct
  REGION 1..26: note = Synthetic
QLVKQLLQEWSIMKLWVTLLPEFTNF

SEQ ID NO: 3082 - protein, 30 aa, synthetic construct
  REGION 1..30: note = Synthetic
RFLEGVISTIKDFAGKVCCSVSVNFCCPTA

SEQ ID NO: 3083 - protein, 22 aa, synthetic construct
  REGION 1..22: note = Synthetic
YDDFVKHAEEVQKKLHEAATKQ

SEQ ID NO: 3084 - protein, 29 aa, synthetic construct
  REGION 1..29: note = Synthetic
EEANDAVESCDQACSSFCNVHVGAATVVA

SEQ ID NO: 3085 - protein, 29 aa, synthetic construct
  REGION 1..29: note = Synthetic
EEANDAVESCDQACSSFCSVHVGSATVVA

SEQ ID NO: 3086 - protein, 34 aa, synthetic construct
  REGION 1..34: note = Synthetic
KSYANWGSSAEKTFNAGNLELAGKFPGETRSCFN

SEQ ID NO: 3087 - protein, 16 aa, synthetic construct
  REGION 1..16: note = Synthetic
DLIQLIHKLLKVRDYD

SEQ ID NO: 3088 - protein, 27 aa, synthetic construct
  REGION 1..27: note = Synthetic
DMCEILSSVLSVAYRTQYSRMEREKGV

SEQ ID NO: 3089 - protein, 36 aa, synthetic construct
  REGION 1..36: note = Synthetic
RDCAGYMRECKEKLCCSGYVCSSRWKRCVLPAPWRR

SEQ ID NO: 3090 - protein, 21 aa, synthetic construct
  REGION 1..21: note = Synthetic
GLLGSLFGAGKKVACALSGLC

SEQ ID NO: 3091 - protein, 40 aa, synthetic construct
  REGION 1..40: note = Synthetic
GGVHRCYEPCEKKKCRLPHKCINGRCTCYVGRNVCAISSH

SEQ ID NO: 3092 - protein, 40 aa, synthetic construct; identical to SEQ ID NO: 3091
  REGION 1..40: note = Synthetic

SEQ ID NO: 3093 - protein, 11 aa, synthetic construct
  REGION 1..11: note = Synthetic
GRGGASNYVRL

SEQ ID NO: 3094 - protein, 11 aa, synthetic construct
  REGION 1..11: note = Synthetic
GRGGASNYVRL

SEQ ID NO: 3095 - protein, 11 aa, synthetic construct
  REGION 1..11: note = Synthetic
GRGGASNYVRL

SEQ ID NO: 3096 - protein, 11 aa, synthetic construct
  REGION 1..11: note = Synthetic
GRGGASNYVRL

SEQ ID NO: 3097 - protein, 11 aa, synthetic construct
  REGION 1..11: note = Synthetic
GRGGASNYVRL

SEQ ID NO: 3098 - protein, 11 aa, synthetic construct
  REGION 1..11: note = Synthetic
GRGGASNYVRL

SEQ ID NO: 3099 - protein, 11 aa, synthetic construct
  REGION 1..11: note = Synthetic
GRGGASNYVRL

SEQ ID NO: 3100 - protein, 11 aa, synthetic construct
  REGION 1..11: note = Synthetic
GRGGASNYVRL

SEQ ID NO: 3101 - protein, 14 aa, synthetic construct
  REGION 1..14: note = Synthetic
IRSILDYISKLLGE

SEQ ID NO: 3102 - protein, 24 aa, synthetic construct
  REGION 1..24: note = Synthetic
DNVAAAWTHALDNVYTAVFQIVTA

SEQ ID NO: 3103 - protein, 34 aa, synthetic construct
  REGION 1..34: note = Synthetic
TCSKLVSSLVEIADQLDDDLNASPGDLCKFVYFC

SEQ ID NO: 3104 - protein, 16 aa, synthetic construct
  REGION 1..16: note = Synthetic
KVLKTVAKQAAKKQME

SEQ ID NO: 3105 - protein, 42 aa, synthetic construct
  REGION 1..42: note = Synthetic
IADAVTCAKRVVSDPQGIRAWVAWRNHCQNRDVSQYVQGCGV

SEQ ID NO: 3106 - protein, 40 aa, synthetic construct
  REGION 1..40: note = Synthetic
KKGGGHCQAYIGRSHGRLAIENYCCCNNYSNSPISSPVMN

SEQ ID NO: 3107 - protein, 14 aa, synthetic construct
  REGION 1..14: note = Synthetic
LESLAKGIVSGIQA

SEQ ID NO: 3108 - protein, 38 aa, synthetic construct
  REGION 1..38: note = Synthetic
FNPCERGGDRGCTVFCKRKLVTRGECRDEGCWCCPGQV

SEQ ID NO: 3109 - protein, 21 aa, synthetic construct
  REGION 1..21: note = Synthetic
EFIENFQDIARRLHREEKWEK

SEQ ID NO: 3110 - protein, 24 aa, synthetic construct
  REGION 1..24: note = Synthetic
AVSQCTNACSNFCTKGSAKAVETA

SEQ ID NO: 3111 - protein, 29 aa, synthetic construct
  REGION 1..29: note = Synthetic
FHDCEDAARELQSQIQEARADLTRRGLRF

SEQ ID NO: 3112 - protein, 18 aa, synthetic construct
  REGION 1..18: note = Synthetic
KFLAEIIDTCNERLDEIL

SEQ ID NO: 3113 - protein, 39 aa, synthetic construct
  REGION 1..39: note = Synthetic
EYLGDLARKFKCTISWNYDIRFIVQYKVQRVILITHLNV

SEQ ID NO: 3114 - protein, 39 aa, synthetic construct
  REGION 1..39: note = Synthetic
KCMTGICKKVDSHPTCFCGGCSNANDVSLDTLISQLPHN

SEQ ID NO: 3115 - protein, 37 aa, synthetic construct
  REGION 1..37: note = Synthetic
NRLEGWLARAERMVKNTFMPTDVDPEAFGHQHKELAA

SEQ ID NO: 3116 - protein, 26 aa, synthetic construct
  REGION 1..26: note = Synthetic
TTAVSALRSCVSILTTMVAYKMVVGN

SEQ ID NO: 3117 - protein, 28 aa, synthetic construct
  REGION 1..28: note = Synthetic
VTTYADFIDSLKTFLTDIPFECKKPGQK

SEQ ID NO: 3118 - protein, 20 aa, synthetic construct
  REGION 1..20: note = Synthetic
RHFGNACEKIVHTCQTGEST

SEQ ID NO: 3119 - protein, 24 aa, synthetic construct
  REGION 1..24: note = Synthetic
YKSGARIGRNCFCLQKGVIYKREN

SEQ ID NO: 3120 - protein, 12 aa, synthetic construct
  REGION 1..12: note = Synthetic
ANANSFISQVNK

SEQ ID NO: 3121 - protein, 17 aa, synthetic construct
  REGION 1..17: note = Synthetic
FFQEFITFCQRLIQLTR

SEQ ID NO: 3122 - protein, 17 aa, synthetic construct
  REGION 1..17: note = Synthetic
FLNKWITFCQSIYSTMT

SEQ ID NO: 3123 - protein, 36 aa, synthetic construct
  REGION 1..36: note = Synthetic
RNCAGYMRECKEKLCCSGYVCSSRWKWCVLPAPWRR

SEQ ID NO: 3124 - protein, 21 aa, synthetic construct
  REGION 1..21: note = Synthetic
IESAWNVIEEFLKTVKSQMNM

SEQ ID NO: 3125 - protein, 18 aa, synthetic construct
  REGION 1..18: note = Synthetic
RDAGRLLRSLKKLKLTTH

SEQ ID NO: 3126 - protein, 23 aa, synthetic construct
  REGION 1..23: note = Synthetic
NRFLNNISSLFERMTSFFGGAGP

SEQ ID NO: 3127 - protein, 17 aa, synthetic construct
  REGION 1..17: note = Synthetic
LFDIIKKVASVVGLASP

SEQ ID NO: 3128 - protein, 18 aa, synthetic construct
  REGION 1..18: note = Synthetic
LQSFLELAYRVLRYLAEP

SEQ ID NO: 3129 - protein, 24 aa, synthetic construct
  REGION 1..24: note = Synthetic
GLFGVLGSIAKHVLPHVVPVIAEK

SEQ ID NO: 3130 - protein, 20 aa, synthetic construct
  REGION 1..20: note = Synthetic
LSRYYASLRHYLNLVTRQRY

SEQ ID NO: 3131 - protein, 20 aa, synthetic construct
  REGION 1..20: note = Synthetic
LSRYYASLRHYLNLVTRQRY

SEQ ID NO: 3132 - protein, 14 aa, synthetic construct
  REGION 1..14: note = Synthetic
CKSYYSIVADCCNQ

SEQ ID NO: 3133 - protein, 14 aa, synthetic construct
  REGION 1..14: note = Synthetic
CKSYYSIVADCCNQ

SEQ ID NO: 3134 - protein, 14 aa, synthetic construct
  REGION 1..14: note = Synthetic
CKSYYSIVADCCNQ

SEQ ID NO: 3135 - protein, 14 aa, synthetic construct
  REGION 1..14: note = Synthetic
CKSYYSIVADCCNQ

SEQ ID NO: 3136 - protein, 14 aa, synthetic construct
  REGION 1..14: note = Synthetic
CKSYYSIVADCCNQ

SEQ ID NO: 3137 - protein, 14 aa, synthetic construct
  REGION 1..14: note = Synthetic
CKSYYSIVADCCNQ

SEQ ID NO: 3138 - protein, 14 aa, synthetic construct
  REGION 1..14: note = Synthetic
CKSYYSIVADCCNQ

SEQ ID NO: 3139 - protein, 14 aa, synthetic construct
  REGION 1..14: note = Synthetic
CKSYYSIVADCCNQ

SEQ ID NO: 3140 - protein, 14 aa, synthetic construct
  REGION 1..14: note = Synthetic
CKSYYSIVADCCNQ

SEQ ID NO: 3141 - protein, 18 aa, synthetic construct
  REGION 1..18: note = Synthetic
LQSFLELAYRVLRYLAEP

SEQ ID NO: 3142 - protein, 42 aa, synthetic construct
  REGION 1..42: note = Synthetic
IADAVACAKRVVSDPQGIRAWVAWRNHCQNKDVSQYVKGCGV

SEQ ID NO: 3143 - protein, 42 aa, synthetic construct
  REGION 1..42: note = Synthetic
IADAVACAKRVVSDPQGIRAWVAWKKHCQNRDVSQYVEGCGV

SEQ ID NO: 3144 - protein, 42 aa, synthetic construct
  REGION 1..42: note = Synthetic
IADAVACAKRVVSDPQGIRAWVAWRNHCQNRDVSQYVKGCGV

SEQ ID NO: 3145 - protein, 42 aa, synthetic construct; identical to SEQ ID NO: 3142
  REGION 1..42: note = Synthetic

SEQ ID NO: 3146 - protein, 42 aa, synthetic construct; identical to SEQ ID NO: 3142
  REGION 1..42: note = Synthetic

SEQ ID NO: 3147 - protein, 42 aa, synthetic construct; identical to SEQ ID NO: 3143
  REGION 1..42: note = Synthetic

SEQ ID NO: 3148 - protein, 42 aa, synthetic construct; identical to SEQ ID NO: 3142
  REGION 1..42: note = Synthetic

SEQ ID NO: 3149 - protein, 25 aa, synthetic construct
  REGION 1..25: note = Synthetic
VLSAYWRNLNNFHRFSGMGFGPETP

SEQ ID NO: 3150 - protein, 20 aa, synthetic construct
  REGION 1..20: note = Synthetic
MAQYAAELRRYINMLTRPRY

SEQ ID NO: 3151 - protein, 20 aa, synthetic construct
  REGION 1..20: note = Synthetic
MAQYAAELRRYINMLTRPRY

SEQ ID NO: 3152 - protein, 20 aa, synthetic construct
  REGION 1..20: note = Synthetic
MAQYAAELRRYINMLTRPRY

SEQ ID NO: 3153 - protein, 16 aa, synthetic construct
  REGION 1..16: note = Synthetic
WTHGLDNIFGMIFAHL

SEQ ID NO: 3154 - protein, 27 aa, synthetic construct
  REGION 1..27: note = Synthetic
GQEGRQMLQKARNLPSMCGIRPQRCDF

SEQ ID NO: 3155 - protein, 38 aa, synthetic construct; identical to SEQ ID NO: 3025
  REGION 1..38: note = Synthetic

SEQ ID NO: 3156 - protein, 38 aa, synthetic construct; identical to SEQ ID NO: 3025
  REGION 1..38: note = Synthetic

SEQ ID NO: 3157 - protein, 38 aa, synthetic construct; identical to SEQ ID NO: 3025
  REGION 1..38: note = Synthetic

SEQ ID NO: 3158 - protein, 38 aa, synthetic construct; identical to SEQ ID NO: 3025
  REGION 1..38: note = Synthetic

SEQ ID NO: 3159 - protein, 23 aa, synthetic construct
  REGION 1..23: note = Synthetic
CNEGWDKCASYYSPIAECCRKKK

SEQ ID NO: 3160 - protein, 37 aa, synthetic construct
  REGION 1..37: note = Synthetic
RCLSPMNHLCHKDADCSGKKRCCSSACGRDCRDPVRG

SEQ ID NO: 3161 - protein, 14 aa, synthetic construct
  REGION 1..14: note = Synthetic
EAVKKLLEALSHLV

SEQ ID NO: 3162 - protein, 26 aa, synthetic construct
  REGION 1..26: note = Synthetic
RDFRGVVDSCCRKSCSFSTLRAYCDS

SEQ ID NO: 3163 - protein, 27 aa, synthetic construct
  REGION 1..27: note = Synthetic
KELGKVIEGFISGVEDIISGASGTVRP

SEQ ID NO: 3164 - protein, 24 aa, synthetic construct
  REGION 1..24: note = Synthetic
AVDRCNEACYRFCTNEAEIVTVAS

SEQ ID NO: 3165 - protein, 24 aa, synthetic construct
  REGION 1..24: note = Synthetic
RSVYSAADKVANALRFGGKNIILL

SEQ ID NO: 3166 - protein, 33 aa, synthetic construct
  REGION 1..33: note = Synthetic
EDIEKLIEEIKKKLAGYMDVTGEQNEEEEKKEL

SEQ ID NO: 3167 - protein, 24 aa, synthetic construct
  REGION 1..24: note = Synthetic
YKSGARIGRNCFCLQKGVIYKREN

SEQ ID NO: 3168 - protein, 24 aa, synthetic construct
  REGION 1..24: note = Synthetic
RKLYHRVGTCIQNIFYQLLLTVNY

SEQ ID NO: 3169 - protein, 37 aa, synthetic construct
  REGION 1..37: note = Synthetic
RCLSPMNHLCHKDSDCSGKKRCCHSACGRDCRDPARG

SEQ ID NO: 3170 - protein, 37 aa, synthetic construct; identical to SEQ ID NO: 3169
  REGION 1..37: note = Synthetic

SEQ ID NO: 3171 - protein, 37 aa, synthetic construct; identical to SEQ ID NO: 3169
  REGION 1..37: note = Synthetic

SEQ ID NO: 3172 - protein, 34 aa, synthetic construct
  REGION 1..34: note = Synthetic
WSRWWSSCWRLWTRIYLVELQLLNLAPGVSSGVK

SEQ ID NO: 3173 - protein, 34 aa, synthetic construct
  REGION 1..34: note = Synthetic
RALKQADYLLDNVVRANLKGALPSATPVPPGSYT

SEQ ID NO: 3174 - protein, 42 aa, synthetic construct
  REGION 1..42: note = Synthetic
KAVEQVKNAFSKLQEKGVYKAMSEFDIFINYIEAYMTMKIQN

SEQ ID NO: 3175 - protein, 42 aa, synthetic construct; identical to SEQ ID NO: 3174
  REGION 1..42: note = Synthetic

SEQ ID NO: 3176 - protein, 42 aa, synthetic construct; identical to SEQ ID NO: 3174
  REGION 1..42: note = Synthetic

SEQ ID NO: 3177 - protein, 36 aa, synthetic construct
  REGION 1..36: note = Synthetic
QCDKAAAECFARNKKSYSLKYQFYPNKFCKGKTPSC

SEQ ID NO: 3178 - protein, 35 aa, synthetic construct
  REGION 1..35: note = Synthetic
HEVLGAFWKMARVGERASPYVSLACILMAISQFNS

SEQ ID NO: 3179 - protein, 31 aa, synthetic construct
  REGION 1..31: note = Synthetic
MARGVAQLNTYYVNLTNGDAIVEYNVTLYHY

SEQ ID NO: 3180 - protein, 14 aa, synthetic construct
  REGION 1..14: note = Synthetic
FDKYARAIQTVGKK

SEQ ID NO: 3181 - protein, 22 aa, synthetic construct
  REGION 1..22: note = Synthetic
LANIYEDYRSGFKSGIGARPGR

SEQ ID NO: 3182 - protein, 12 aa, synthetic construct
  REGION 1..12: note = Synthetic
GQAALNAASEAL

SEQ ID NO: 3183 - protein, 20 aa, synthetic construct
  REGION 1..20: note = Synthetic
MAQYAADLRRYINMLTRPRY

SEQ ID NO: 3184 - protein, 33 aa, synthetic construct
  REGION 1..33: note = Synthetic
VEACESVADTVFNAVWTLGCRPFMNSQRSACIC

SEQ ID NO: 3185 - protein, 17 aa, synthetic construct
  REGION 1..17: note = Synthetic
AHTFATKLMKCIDDNLI

SEQ ID NO: 3186 - protein, 14 aa, synthetic construct
  REGION 1..14: note = Synthetic
EAVKKLLEALSHLV

SEQ ID NO: 3187 - protein, 15 aa, synthetic construct
  REGION 1..15: note = Synthetic
TQAWTNFKKWFKKMV

SEQ ID NO: 3188 - protein, 17 aa, synthetic construct
  REGION 1..17: note = Synthetic
KDLHTVVSAILQALGKK

SEQ ID NO: 3189 - protein, 41 aa, synthetic construct
  REGION 1..41: note = Synthetic
EFMQRALQDLRKTAYSLDARTESLLLQAERRALCACWPAGH

SEQ ID NO: 3190 - protein, 42 aa, synthetic construct
  REGION 1..42: note = Synthetic
CNRACGTCCARCNCVPPGTSGNTETCPCYASLTTHGNKRKCP

SEQ ID NO: 3191 - protein, 25 aa, synthetic construct
  REGION 1..25: note = Synthetic
GAVGILNSFLDEYLDIDIAKKLRHF

SEQ ID NO: 3192 - protein, 16 aa, synthetic construct
  REGION 1..16: note = Synthetic
KYLKSLFSHASEVVKP

SEQ ID NO: 3193 - protein, 23 aa, synthetic construct
  REGION 1..23: note = Synthetic
CNEGWEKCASYYSPIAECCRKKK

SEQ ID NO: 3194 - protein, 23 aa, synthetic construct
  REGION 1..23: note = Synthetic
CNEGWEKCASYYSPIAECCRKKK

SEQ ID NO: 3195 - protein, 25 aa, synthetic construct
  REGION 1..25: note = Synthetic
KGCSRCCSYAGEAVDHEVAAAKPNN

SEQ ID NO: 3196 - protein, 17 aa, synthetic construct
  REGION 1..17: note = Synthetic
GGNCDGVMRQCKCIRQC

SEQ ID NO: 3197 - protein, 12 aa, synthetic construct
  REGION 1..12: note = Synthetic
CGWVEAAYKGLV

SEQ ID NO: 3198 - protein, 20 aa, synthetic construct
  REGION 1..20: note = Synthetic
IMYLVRKIIKYCRKLKSCYE

SEQ ID NO: 3199 - protein, 20 aa, synthetic construct
  REGION 1..20: note = Synthetic
IMYLVRKIIKYCRKLKSCYE

SEQ ID NO: 3200 - protein, 24 aa, synthetic construct
  REGION 1..24: note = Synthetic
YKCGARIGRNCFCLQKGVIYKRED

SEQ ID NO: 3201 - protein, 36 aa, synthetic construct
  REGION 1..36: note = Synthetic
RDCAGYMRECKEKLCCSGYVCSSRWKWCVLPAPWRR

SEQ ID NO: 3202 - protein, 36 aa, synthetic construct; identical to SEQ ID NO: 3201
  REGION 1..36: note = Synthetic

SEQ ID NO: 3203 - protein, 36 aa, synthetic construct; identical to SEQ ID NO: 3201
  REGION 1..36: note = Synthetic

SEQ ID NO: 3204 - protein, 36 aa, synthetic construct; identical to SEQ ID NO: 3201
  REGION 1..36: note = Synthetic

SEQ ID NO: 3205 - protein, 36 aa, synthetic construct; identical to SEQ ID NO: 3201
  REGION 1..36: note = Synthetic

SEQ ID NO: 3206 - protein, 36 aa, synthetic construct; identical to SEQ ID NO: 3201
  REGION 1..36: note = Synthetic

SEQ ID NO: 3207 - protein, 36 aa, synthetic construct; identical to SEQ ID NO: 3201
  REGION 1..36: note = Synthetic

SEQ ID NO: 3208 - protein, 36 aa, synthetic construct; identical to SEQ ID NO: 3201
  REGION 1..36: note = Synthetic

SEQ ID NO: 3209 - protein, 36 aa, synthetic construct; identical to SEQ ID NO: 3201
  REGION 1..36: note = Synthetic

SEQ ID NO: 3210 - protein, 36 aa, synthetic construct; identical to SEQ ID NO: 3201
  REGION 1..36: note = Synthetic

SEQ ID NO: 3211 - protein, 36 aa, synthetic construct; identical to SEQ ID NO: 3201
  REGION 1..36: note = Synthetic

SEQ ID NO: 3212 - protein, 36 aa, synthetic construct; identical to SEQ ID NO: 3201
  REGION 1..36: note = Synthetic

SEQ ID NO: 3213 - protein, 36 aa, synthetic construct; identical to SEQ ID NO: 3201
  REGION 1..36: note = Synthetic

SEQ ID NO: 3214 - protein, 36 aa, synthetic construct; identical to SEQ ID NO: 3201
  REGION 1..36: note = Synthetic

SEQ ID NO: 3215 - protein, 36 aa, synthetic construct; identical to SEQ ID NO: 3201
  REGION 1..36: note = Synthetic

SEQ ID NO: 3216 - protein, 36 aa, synthetic construct; identical to SEQ ID NO: 3201
  REGION 1..36: note = Synthetic

SEQ ID NO: 3217 - protein, 36 aa, synthetic construct; identical to SEQ ID NO: 3201
  REGION 1..36: note = Synthetic

SEQ ID NO: 3218 - protein, 36 aa, synthetic construct
  REGION 1..36: note = Synthetic
RDCAGYMRECKEKLCCSGYVCSSRWKWCVLSAPWRR

SEQ ID NO: 3219 - protein, 36 aa, synthetic construct
  REGION 1..36: note = Synthetic
RDCAGYMRECKEKLCCSGYVCPSRWKWCVLPAPWRR

SEQ ID NO: 3220 - protein, 36 aa, synthetic construct
  REGION 1..36: note = Synthetic
RDCAGYMRECKEKLCCSGYVCSSRWKWCVSPAPWRR

SEQ ID NO: 3221 - protein, 21 aa, synthetic construct
  REGION 1..21: note = Synthetic
TVVEFLNKWITFCQSIYSTLT

SEQ ID NO: 3222 - protein, 21 aa, synthetic construct
  REGION 1..21: note = Synthetic
TVVEFLNKWITFCQSIYSTMT

SEQ ID NO: 3223 - protein, 34 aa, synthetic construct
  REGION 1..34: note = Synthetic
INNFAACGKAWPEDKKRKVNKCYICDNELTLCTR

SEQ ID NO: 3224 - protein, 13 aa, synthetic construct
  REGION 1..13: note = Synthetic
VTAAIRKVGTGAA

SEQ ID NO: 3225 - protein, 12 aa, synthetic construct
  REGION 1..12: note = Synthetic
KALREYCSVVRN

SEQ ID NO: 3226 - protein, 20 aa, synthetic construct
  REGION 1..20: note = Synthetic
AVEFLNKWITFCQSIYSTMT

SEQ ID NO: 3227 - protein, 11 aa, synthetic construct
  REGION 1..11: note = Synthetic
ISAISAIAHHL

SEQ ID NO: 3228 - protein, 38 aa, synthetic construct
  REGION 1..38: note = Synthetic
IYGGCGGNANNFSSYYECHIKCFGPRAIIFPEDSPKEN

SEQ ID NO: 3229 - protein, 33 aa, synthetic construct
  REGION 1..33: note = Synthetic
SKILRSLQAFLAIAARVFAHGAATLTEPLVPTA

SEQ ID NO: 3230 - protein, 37 aa, synthetic construct
  REGION 1..37: note = Synthetic
RCLSPMNHLCHKDADCSGKKRCCPSACGRDCRDPARG

SEQ ID NO: 3231 - protein, 35 aa, synthetic construct
  REGION 1..35: note = Synthetic
VKRFKKFFKKLKNNVKKRVKKFFRKPRVIGVTIPF

SEQ ID NO: 3232 - protein, 42 aa, synthetic construct
  REGION 1..42: note = Synthetic
CYGAAGTCGRIVCDCDRTAALCFGDSEYIERHKNIDTKRHCQ

SEQ ID NO: 3233 - protein, 24 aa, synthetic construct
  REGION 1..24: note = Synthetic
YKSGARIGRNCFCLQKGVIYKREN

SEQ ID NO: 3234 - protein, 14 aa, synthetic construct
  REGION 1..14: note = Synthetic
LLHHGLNCAKGVLA

SEQ ID NO: 3235 - protein, 21 aa, synthetic construct
  REGION 1..21: note = Synthetic
GRKCCSTWDKCHPVHLPCPSS

SEQ ID NO: 3236 - protein, 37 aa, synthetic construct; identical to SEQ ID NO: 3169
  REGION 1..37: note = Synthetic

SEQ ID NO: 3237 - protein, 37 aa, synthetic construct; identical to SEQ ID NO: 3169
  REGION 1..37: note = Synthetic

SEQ ID NO: 3238 - protein, 21 aa, synthetic construct
  REGION 1..21: note = Synthetic
TVVEFLNKWITFCQSIYSTLT

SEQ ID NO: 3239 - protein, 19 aa, synthetic construct
  REGION 1..19: note = Synthetic
EAIKSLLKAVSQRRSKRAP

SEQ ID NO: 3240 - protein, 42 aa, synthetic construct
  REGION 1..42: note = Synthetic
CYGAAGTCGRIVCDCDRTAALCFGDSEYIGAHKNIDTKRHCQ

SEQ ID NO: 3241 - protein, 20 aa, synthetic construct
  REGION 1..20: note = Synthetic
LAEQLMEKIKNLWYKRALGY

SEQ ID NO: 3242 - protein, 42 aa, synthetic construct
  REGION 1..42: note = Synthetic
CYGAAGTCARIVCDCDRTAALCFGDSEYIEGHKRIDTKRYCQ

SEQ ID NO: 3243 - protein, 22 aa, synthetic construct
  REGION 1..22: note = Synthetic
AFNAIAKGVAAMKKAKCKHKSG

SEQ ID NO: 3244 - protein, 22 aa, synthetic construct
  REGION 1..22: note = Synthetic
AFNAIAKGVAAMKKAKCKHKSG

SEQ ID NO: 3245 - protein, 21 aa, synthetic construct
  REGION 1..21: note = Synthetic
KNINEFLKSFIHIVQMFINPS

SEQ ID NO: 3246 - protein, 30 aa, synthetic construct
  REGION 1..30: note = Synthetic
LDSFTSVINSAYTFFAVIQTKYSQSSSHNL

SEQ ID NO: 3247 - protein, 13 aa, synthetic construct
  REGION 1..13: note = Synthetic
ERYANYGETLGNN

SEQ ID NO: 3248 - protein, 22 aa, synthetic construct
  REGION 1..22: note = Synthetic
WYSFLEELHSAFQQIAGEAESK

SEQ ID NO: 3249 - protein, 36 aa, synthetic construct
  REGION 1..36: note = Synthetic
RDCAGYMRECNEKLCCSGYVCSSRWKWCVLPAPWRR

SEQ ID NO: 3250 - protein, 24 aa, synthetic construct
  REGION 1..24: note = Synthetic
YKSGARIGRNCFCLQKGVIYKRED

SEQ ID NO: 3251 - protein, 27 aa, synthetic construct
  REGION 1..27: note = Synthetic
GSCASVCRKAIGVAAGKCINGRCVCYP

SEQ ID NO: 3252 - protein, 21 aa, synthetic construct
  REGION 1..21: note = Synthetic
SSWPHLLREILRAARLEGPAG

SEQ ID NO: 3253 - protein, 24 aa, synthetic construct
  REGION 1..24: note = Synthetic
YKSGTRIGRNCFCLQKGVIYKREN

SEQ ID NO: 3254 - protein, 24 aa, synthetic construct
  REGION 1..24: note = Synthetic
YKSGTRIGRNCFCLQKGVIYKREN

SEQ ID NO: 3255 - protein, 24 aa, synthetic construct
  REGION 1..24: note = Synthetic
YKSGTRIGRNCFCLQKGVIYKREN

SEQ ID NO: 3256 - protein, 24 aa, synthetic construct
  REGION 1..24: note = Synthetic
ILDAMGKAWNAVGNSISRYYCSAE

SEQ ID NO: 3257 - protein, 26 aa, synthetic construct
  REGION 1..26: note = Synthetic
FAYCNAGWEKCLAVYTPVASCCRKKK

SEQ ID NO: 3258 - protein, 22 aa, synthetic construct
  REGION 1..22: note = Synthetic
RGLLSGILGAGKHIVCGLSGLC

SEQ ID NO: 3259 - protein, 22 aa, synthetic construct
  REGION 1..22: note = Synthetic
RGLLSGILGAGKHIVCGLSGLC

SEQ ID NO: 3260 - protein, 34 aa, synthetic construct
  REGION 1..34: note = Synthetic
KQCEEIANKVIKPIKEALEQGVTSEDVCKKILAC

SEQ ID NO: 3261 - protein, 40 aa, synthetic construct
  REGION 1..40: note = Synthetic
WMNLLTTGIAAVSILLYLSATIILPNVLRLLVARAIIVRV

SEQ ID NO: 3262 - protein, 36 aa, synthetic construct
  REGION 1..36: note = Synthetic
SKALNAAKNFVSEKIGATPSEAGQIPFDEFMDVLYS

SEQ ID NO: 3263 - protein, 24 aa, synthetic construct
  REGION 1..24: note = Synthetic
DDYTKCCNSFDAFLMCGFLLSKES

SEQ ID NO: 3264 - protein, 21 aa, synthetic construct
  REGION 1..21: note = Synthetic
NAVEFLNKWITFCQSIYSTMT

SEQ ID NO: 3265 - protein, 21 aa, synthetic construct
  REGION 1..21: note = Synthetic
NAVEFLNKWITFCQSIYSTMT

SEQ ID NO: 3266 - protein, 21 aa, synthetic construct
  REGION 1..21: note = Synthetic
NAVEFLNKWITFCQSIYSTMT

SEQ ID NO: 3267 - protein, 21 aa, synthetic construct
  REGION 1..21: note = Synthetic
NAVEFLNKWITFCQSIYSTMT

SEQ ID NO: 3268 - protein, 21 aa, synthetic construct
  REGION 1..21: note = Synthetic
NAVEFLNKWITFCQSIYSTMT

SEQ ID NO: 3269 - protein, 21 aa, synthetic construct
  REGION 1..21: note = Synthetic
NAVEFLNKWITFCQSIYSTMT

SEQ ID NO: 3270 - protein, 21 aa, synthetic construct
  REGION 1..21: note = Synthetic
NAVEFLNKWITFCQSIYSTMT

SEQ ID NO: 3271 - protein, 21 aa, synthetic construct
  REGION 1..21: note = Synthetic
NAVEFLNKWITFCQSIYSTMT

SEQ ID NO: 3272 - protein, 18 aa, synthetic construct
  REGION 1..18: note = Synthetic
WTQFMQVCERLAKNANPV

SEQ ID NO: 3273 - protein, 34 aa, synthetic construct
  REGION 1..34: note = Synthetic
ELGHKIMKNLENTVKEIIKYLKSLFPPASEVVKP

SEQ ID NO: 3274 - protein, 20 aa, synthetic construct
  REGION 1..20: note = Synthetic
MTKYLTALRHYINLVTRQRY

SEQ ID NO: 3275 - protein, 28 aa, synthetic construct
  REGION 1..28: note = Synthetic
VCKDLINIMEGLERQVRQCACGEQVWLF

SEQ ID NO: 3276 - protein, 37 aa, synthetic construct
  REGION 1..37: note = Synthetic
ITKASKCAKKIYKRHKFQAWYGWRNHCQGTLPDISKC

SEQ ID NO: 3277 - protein, 16 aa, synthetic construct
  REGION 1..16: note = Synthetic
IRNIFSQILHAATSLS

SEQ ID NO: 3278 - protein, 14 aa, synthetic construct
  REGION 1..14: note = Synthetic
LNSCGKNVPQGFVC

SEQ ID NO: 3279 - protein, 27 aa, synthetic construct
  REGION 1..27: note = Synthetic
IQRIIDTFGTIINEISNIIRKIIPDLQ

SEQ ID NO: 3280 - protein, 24 aa, synthetic construct
  REGION 1..24: note = Synthetic
YKSGARIGRNCFCLQKGVIYKREN

SEQ ID NO: 3281 - protein, 24 aa, synthetic construct
  REGION 1..24: note = Synthetic
YKSGARIGRNCFCLQKGVIYKREN

SEQ ID NO: 3282 - protein, 24 aa, synthetic construct
  REGION 1..24: note = Synthetic
YKSGARIGRNCFCLQKGVIYKREN

SEQ ID NO: 3283 - protein, 24 aa, synthetic construct
  REGION 1..24: note = Synthetic
YKSGARIGRNCFCLQKGVIYKREN

SEQ ID NO: 3284 - protein, 42 aa, synthetic construct
  REGION 1..42: note = Synthetic
KWVQDYIAKLDQRTQQKQNSTAPQTSKPLNIRFTTQDPKNRS

SEQ ID NO: 3285 - protein, 42 aa, synthetic construct; identical to SEQ ID NO: 3105
  REGION 1..42: note = Synthetic

SEQ ID NO: 3286 - protein, 42 aa, synthetic construct; identical to SEQ ID NO: 3105
  REGION 1..42: note = Synthetic

SEQ ID NO: 3287 - protein, 36 aa, synthetic construct
  REGION 1..36: note = Synthetic
GAFCGQACSSVKCPKKCFCHPEEKVCYREMRTKERD

SEQ ID NO: 3288 - protein, 24 aa, synthetic construct
  REGION 1..24: note = Synthetic
WLAGCPSGWHNCKKHKPTIGWCCK

SEQ ID NO: 3289 - protein, 11 aa, synthetic construct
  REGION 1..11: note = Synthetic
LRELEELLEDY

SEQ ID NO: 3290 - protein, 15 aa, synthetic construct
  REGION 1..15: note = Synthetic
YHTCCQNGLKCVRYP

SEQ ID NO: 3291 - protein, 21 aa, synthetic construct
  REGION 1..21: note = Synthetic
NRFGSRIDGIYNGLCRDSIWK

SEQ ID NO: 3292 - protein, 23 aa, synthetic construct
  REGION 1..23: note = Synthetic
GQTLGKFLQDILWEEAEETLADE

SEQ ID NO: 3293 - protein, 23 aa, synthetic construct
  REGION 1..23: note = Synthetic
GQTLGKFLQDILWEEAEETLANE

SEQ ID NO: 3294 - protein, 13 aa, synthetic construct
  REGION 1..13: note = Synthetic
QYSRLGDKWARNK

SEQ ID NO: 3295 - protein, 34 aa, synthetic construct
  REGION 1..34: note = Synthetic
STIISNITDIVRELDVHIFTRETSTVANGGPVPI

SEQ ID NO: 3296 - protein, 31 aa, synthetic construct
  REGION 1..31: note = Synthetic
DILDKMENAIHKAAQAGIGLAKPIENMILPK

SEQ ID NO: 3297 - protein, 31 aa, synthetic construct
  REGION 1..31: note = Synthetic
DFVDKLKKFAHTDNAEPDQLRREKAPNNDNY

SEQ ID NO: 3298 - protein, 42 aa, synthetic construct
  REGION 1..42: note = Synthetic
IQGAARALGSGLNAGRAAGIPKACGVNIPYKISTSTNCKTVR

SEQ ID NO: 3299 - protein, 11 aa, synthetic construct
  REGION 1..11: note = Synthetic
ISAISAIADHL

SEQ ID NO: 3300 - protein, 30 aa, synthetic construct
  REGION 1..30: note = Synthetic
MQQMQQMMQYLPRMCGMSYPTECRMRPIFA

SEQ ID NO: 3301 - protein, 27 aa, synthetic construct
  REGION 1..27: note = Synthetic
VEHLVEGLRKCVNELGPEASEAVKKLL

SEQ ID NO: 3302 - protein, 18 aa, synthetic construct
  REGION 1..18: note = Synthetic
FQRFLETAYRALRHLTSL

SEQ ID NO: 3303 - protein, 26 aa, synthetic construct
  REGION 1..26: note = Synthetic
VLSHADEIARDLEEWIRHRYHESWLV

SEQ ID NO: 3304 - protein, 33 aa, synthetic construct
  REGION 1..33: note = Synthetic
LIRGLDTALRRMGDCQSRDATDGFPTIRVHLGV

SEQ ID NO: 3305 - protein, 29 aa, synthetic construct
  REGION 1..29: note = Synthetic
FHDCEDAARELQSQIVEARADLARRGLRF

SEQ ID NO: 3306 - protein, 19 aa, synthetic construct
  REGION 1..19: note = Synthetic
EFLSRWITFCQSIIATMTQ

SEQ ID NO: 3307 - protein, 17 aa, synthetic construct
  REGION 1..17: note = Synthetic
CKAFSKGGNACWCKGLR

SEQ ID NO: 3308 - protein, 16 aa, synthetic construct
  REGION 1..16: note = Synthetic
YRRGCSAATGCYRFTN

SEQ ID NO: 3309 - protein, 17 aa, synthetic construct
  REGION 1..17: note = Synthetic
LKNLMERFMQHVSHCQN

SEQ ID NO: 3310 - protein, 42 aa, synthetic construct
  REGION 1..42: note = Synthetic
IADAVACAKRVVSDPQGVRAWVAWRNHCQNKDVSQYVKGCGV

SEQ ID NO: 3311 - protein, 15 aa, synthetic construct
  REGION 1..15: note = Synthetic
RIVDAVREIIDDFCD

SEQ ID NO: 3312 - protein, 16 aa, synthetic construct
  REGION 1..16: note = Synthetic
NVAKKLVSHVAKKQLE

SEQ ID NO: 3313 - protein, 20 aa, synthetic construct
  REGION 1..20: note = Synthetic
VLDILKNAAKNILAHAAEQI

SEQ ID NO: 3314 - protein, 16 aa, synthetic construct
  REGION 1..16: note = Synthetic
DAKQWIKTMFKNWYQT

SEQ ID NO: 3315 - protein, 16 aa, synthetic construct
  REGION 1..16: note = Synthetic
GTNIWNEIRTWSNWKA

SEQ ID NO: 3316 - protein, 24 aa, synthetic construct
  REGION 1..24: note = Synthetic
ARTCIYTLLTNCTTCLNDNGIVCP

SEQ ID NO: 3317 - protein, 24 aa, synthetic construct
  REGION 1..24: note = Synthetic
MYGGCGGNANNFKTIVECHRTCVG

SEQ ID NO: 3318 - protein, 15 aa, synthetic construct
  REGION 1..15: note = Synthetic
VETILKNWLSIIQKK

SEQ ID NO: 3319 - protein, 26 aa, synthetic construct
  REGION 1..26: note = Synthetic
TTVRSVAQSAGYWLDPPEFDKAHGKK

SEQ ID NO: 3320 - protein, 29 aa, synthetic construct
  REGION 1..29: note = Synthetic
ETFCTNLINLLYRLFCLRASDERATENTY

SEQ ID NO: 3321 - protein, 27 aa, synthetic construct
  REGION 1..27: note = Synthetic
DAENAWNKAFEEMYKIVFANLSGNPVS

SEQ ID NO: 3322 - protein, 25 aa, synthetic construct
  REGION 1..25: note = Synthetic
SDIIDELKDAVKTVKETWSEVKQIG

SEQ ID NO: 3323 - protein, 17 aa, synthetic construct
  REGION 1..17: note = Synthetic
GGNCDGVIRQCKCIRQC

SEQ ID NO: 3324 - protein, 20 aa, synthetic construct
  REGION 1..20: note = Synthetic
ITEFLNKWITFCQSIFSTLT

SEQ ID NO: 3325 - protein, 20 aa, synthetic construct
  REGION 1..20: note = Synthetic
ITEFLNKWITFCQSIFSTLT

SEQ ID NO: 3326 - protein, 20 aa, synthetic construct
  REGION 1..20: note = Synthetic
ITEFLNKWITFCQSIFSTLT

SEQ ID NO: 3327 - protein, 20 aa, synthetic construct
  REGION 1..20: note = Synthetic
ITEFLNKWITFCQSIFSTLT

SEQ ID NO: 3328 - protein, 20 aa, synthetic construct
  REGION 1..20: note = Synthetic
ITEFLNKWITFCQSIFSTLT

SEQ ID NO: 3329 - protein, 20 aa, synthetic construct
  REGION 1..20: note = Synthetic
ITEFLNKWITFCQSIFSTLT

SEQ ID NO: 3330 - protein, 28 aa, synthetic construct
  REGION 1..28: note = Synthetic
DNVQTAFNKAFDTMYYVIFENLDGHTVN

SEQ ID NO: 3331 - protein, 25 aa, synthetic construct
  REGION 1..25: note = Synthetic
ERGFGCFRSCWKAGHDDKTCKSMCG

SEQ ID NO: 3332 - protein, 27 aa, synthetic construct
  REGION 1..27: note = Synthetic
KDLISVIEDLLTFFRAQMRKLVMNPKH

SEQ ID NO: 3333 - protein, 41 aa, synthetic construct
  REGION 1..41: note = Synthetic
GYYGDLAARLGYFPSSIVREDLTLKPGKIDMKTDQWDFYCQ

SEQ ID NO: 3334 - protein, 23 aa, synthetic construct
  REGION 1..23: note = Synthetic
LEDIWNSLSSVFTETQPVERIQR

SEQ ID NO: 3335 - protein, 18 aa, synthetic construct
  REGION 1..18: note = Synthetic
MKCCRNGCGKMGCTTPKF

SEQ ID NO: 3336 - protein, 25 aa, synthetic construct
  REGION 1..25: note = Synthetic
NALTFLKSLLEIFQKEKMRGMRGKI

SEQ ID NO: 3337 - protein, 25 aa, synthetic construct
  REGION 1..25: note = Synthetic
NALTFLKSLLEIFQKEKMRGMRGKI

SEQ ID NO: 3338 - protein, 25 aa, synthetic construct
  REGION 1..25: note = Synthetic
NALTFLKSLLEIFQKEKMRGMRGKI

SEQ ID NO: 3339 - protein, 25 aa, synthetic construct
  REGION 1..25: note = Synthetic
NALTFLKSLLEIFQKEKMRGMRGKI

SEQ ID NO: 3340 - protein, 31 aa, synthetic construct
  REGION 1..31: note = Synthetic
FQQVVDTLQSMVTNGPDTAQKDVDSINNNRC

SEQ ID NO: 3341 - protein, 22 aa, synthetic construct
  REGION 1..22: note = Synthetic
ALSRLQGALQDMLRQLDLSPGC

SEQ ID NO: 3342 - protein, 42 aa, synthetic construct
  REGION 1..42: note = Synthetic
SNIGEHAKSLYTDTVAVLTPYLQKIRENVTKMYQVYVESKQH

SEQ ID NO: 3343 - protein, 36 aa, synthetic construct
  REGION 1..36: note = Synthetic
RDCAGYMRECKEKLCCSGYVCSSGWKWCVLPAPWRR

SEQ ID NO: 3344 - protein, 26 aa, synthetic construct
  REGION 1..26: note = Synthetic
NAMIGVAKSVGKTALSTLACKIDKSC

SEQ ID NO: 3345 - protein, 11 aa, synthetic construct
  REGION 1..11: note = Synthetic
YGSYSGLGSSL

SEQ ID NO: 3346 - protein, 26 aa, synthetic construct
  REGION 1..26: note = Synthetic
EDIFDVVKTVVEVAEAMRDEKKKKEL

SEQ ID NO: 3347 - protein, 18 aa, synthetic construct
  REGION 1..18: note = Synthetic
AKKAVGKCDDFKCNCIKL

SEQ ID NO: 3348 - protein, 34 aa, synthetic construct
  REGION 1..34: note = Synthetic
MCQYLESWWRTMRSCRDSSGLSGPCPGTYGTCWT

SEQ ID NO: 3349 - protein, 30 aa, synthetic construct
  REGION 1..30: note = Synthetic
ARRWRRAFRRLRKIAPLIPTFVRLYPVGKK

SEQ ID NO: 3350 - protein, 16 aa, synthetic construct
  REGION 1..16: note = Synthetic
KVLKAVGKQAAKKQME

SEQ ID NO: 3351 - protein, 18 aa, synthetic construct
  REGION 1..18: note = Synthetic
LQSFLELAYRVLRYLAQP

SEQ ID NO: 3352 - protein, 13 aa, synthetic construct
  REGION 1..13: note = Synthetic
GKDLSKYLEGCHL

SEQ ID NO: 3353 - protein, 24 aa, synthetic construct
  REGION 1..24: note = Synthetic
YKNGARIGRNCFCLQKGVLYKKEN

SEQ ID NO: 3354 - protein, 25 aa, synthetic construct
  REGION 1..25: note = Synthetic
GLLSVLGSVAKHVLPHVVPVIAEKL

SEQ ID NO: 3355 - protein, 25 aa, synthetic construct
  REGION 1..25: note = Synthetic
GLLSVLGSVAKHVLPHVVPVIAEKL

SEQ ID NO: 3356 - protein, 22 aa, synthetic construct
  REGION 1..22: note = Synthetic
TVVDFLRRWIAFCQSIISTSPQ

SEQ ID NO: 3357 - protein, 29 aa, synthetic construct
  REGION 1..29: note = Synthetic
WRCIREALDEVARAVGIELASKPAAAASD

SEQ ID NO: 3358 - protein, 26 aa, synthetic construct
  REGION 1..26: note = Synthetic
RVQDALSGYCRNENPCCVRRVLMEDG

SEQ ID NO: 3359 - protein, 42 aa, synthetic construct
  REGION 1..42: note = Synthetic
GSFGNIFGHFLGRVGTRYISSLFNKKREERKSNHAYIIEDYN

SEQ ID NO: 3360 - protein, 22 aa, synthetic construct
  REGION 1..22: note = Synthetic
LFGVLAKVASHVVPAIAEHFQA

SEQ ID NO: 3361 - protein, 33 aa, synthetic construct
  REGION 1..33: note = Synthetic
RGVTTFWETVETLVSNGFISDRGHKWLMGHEKA

SEQ ID NO: 3362 - protein, 25 aa, synthetic construct
  REGION 1..25: note = Synthetic
EWAKVWTKLFYILYSCNHHNCANDI

SEQ ID NO: 3363 - protein, 32 aa, synthetic construct
  REGION 1..32: note = Synthetic
QRCNRWCHNGCGNGKGDYCKAMSHGGLCHCYC

SEQ ID NO: 3364 - protein, 12 aa, synthetic construct
  REGION 1..12: note = Synthetic
CGWVSRAWKGVV

SEQ ID NO: 3365 - protein, 24 aa, synthetic construct
  REGION 1..24: note = Synthetic
ESMKTLVQDMYYLIQYWRQADDTR

SEQ ID NO: 3366 - protein, 17 aa, synthetic construct
  REGION 1..17: note = Synthetic
FEEFADSACRIIEKIYA

SEQ ID NO: 3367 - protein, 34 aa, synthetic construct
  REGION 1..34: note = Synthetic
LANFIASLTAGALVLSAIGIALIIISKNDRVQRS

SEQ ID NO: 3368 - protein, 24 aa, synthetic construct
  REGION 1..24: note = Synthetic
IKEAMESLPKAVRDELEKAIAGGA

SEQ ID NO: 3369 - protein, 24 aa, synthetic construct
  REGION 1..24: note = Synthetic
IKEAMESLPKAVRDELEKAIAGGA

SEQ ID NO: 3370 - protein, 24 aa, synthetic construct
  REGION 1..24: note = Synthetic
IKEAMESLPKAVRDELEKAIAGGA

SEQ ID NO: 3371 - protein, 23 aa, synthetic construct
  REGION 1..23: note = Synthetic
ACYSASTCCSKACNLTTKRCVLS

SEQ ID NO: 3372 - protein, 40 aa, synthetic construct
  REGION 1..40: note = Synthetic
ACELYQGLCRNACQKYEIQYLSCPKTRKCCLKYPRKITSF

SEQ ID NO: 3373 - protein, 19 aa, synthetic construct
  REGION 1..19: note = Synthetic
MMDEFDQYARKVQMVGRKK

SEQ ID NO: 3374 - protein, 24 aa, synthetic construct
  REGION 1..24: note = Synthetic
FMGGLIKAATKIVPAAYCAITKKC

SEQ ID NO: 3375 - protein, 36 aa, synthetic construct
  REGION 1..36: note = Synthetic
RDCAGYMRECKEKLCCSGYVCSSRWKWCVLPAPWCR

SEQ ID NO: 3376 - protein, 36 aa, synthetic construct
  REGION 1..36: note = Synthetic
RDCAGYMRECKEKLCCSGYVCSSRWKWCVLPAPWRC

SEQ ID NO: 3377 - protein, 17 aa, synthetic construct
  REGION 1..17: note = Synthetic
CGGRGRKCFGQCLCGYD

SEQ ID NO: 3378 - protein, 24 aa, synthetic construct
  REGION 1..24: note = Synthetic
YKSGARIGRNCFCLQKGVIYKRED

SEQ ID NO: 3379 - protein, 33 aa, synthetic construct
  REGION 1..33: note = Synthetic
KCCAGGCRSGKCINGKCQCYGRSDLNEEFENYQ

SEQ ID NO: 3380 - protein, 29 aa, synthetic construct
  REGION 1..29: note = Synthetic
KVFQAVRYFIHMLENGYRLWLSSIGTGMG

SEQ ID NO: 3381 - protein, 27 aa, synthetic construct
  REGION 1..27: note = Synthetic
SARKLLQDIMSRQQGERNQEQGARVRL

SEQ ID NO: 3382 - protein, 21 aa, synthetic construct
  REGION 1..21: note = Synthetic
KNINEFLKSFIHIVQMFINPS

SEQ ID NO: 3383 - protein, 21 aa, synthetic construct
  REGION 1..21: note = Synthetic
KNINEFLKSFIHIVQMFINPS

SEQ ID NO: 3384 - protein, 20 aa, synthetic construct
  REGION 1..20: note = Synthetic
MAQYAAEMRRYINMLTRPRY

SEQ ID NO: 3385 - protein, 33 aa, synthetic construct; identical to SEQ ID NO: 3229
  REGION 1..33: note = Synthetic

SEQ ID NO: 3386 - protein, 31 aa, synthetic construct
  REGION 1..31: note = Synthetic
MEEFKNFIKRMNLRLENMFVPEIGDKCVESD

SEQ ID NO: 3387 - protein, 24 aa, synthetic construct
  REGION 1..24: note = Synthetic
GKTFAKEGGKFGLEFIACKVTNQC

SEQ ID NO: 3388 - protein, 12 aa, synthetic construct
  REGION 1..12: note = Synthetic
YGEGFRWISQYI

SEQ ID NO: 3389 - protein, 42 aa, synthetic construct
  REGION 1..42: note = Synthetic
CTDAAGTCARIVCDCDRTAAICFAAAPYNINNFMISSSTHCQ

SEQ ID NO: 3390 - protein, 22 aa, synthetic construct
  REGION 1..22: note = Synthetic
QKCAECCGGIGKCYGPQCLCNR

SEQ ID NO: 3391 - protein, 12 aa, synthetic construct
  REGION 1..12: note = Synthetic
FQEAYRRFYGPV

SEQ ID NO: 3392 - protein, 17 aa, synthetic construct
  REGION 1..17: note = Synthetic
VDNIRSILDYISRLLGE

SEQ ID NO: 3393 - protein, 17 aa, synthetic construct
  REGION 1..17: note = Synthetic
VDNIRSILDYISRLLGE

SEQ ID NO: 3394 - protein, 18 aa, synthetic construct
  REGION 1..18: note = Synthetic
CSRCCSYAGKAVQTQSGH

SEQ ID NO: 3395 - protein, 23 aa, synthetic construct
  REGION 1..23: note = Synthetic
KEVQKLAKEVLEIFQYCAYRKNQ

SEQ ID NO: 3396 - protein, 16 aa, synthetic construct
  REGION 1..16: note = Synthetic
KYLKSLFSHAFEVVKT

SEQ ID NO: 3397 - protein, 18 aa, synthetic construct
  REGION 1..18: note = Synthetic
SAGKSALNALACKIDKSC

SEQ ID NO: 3398 - protein, 16 aa, synthetic construct
  REGION 1..16: note = Synthetic
KVAKKLVSHVAQKQME

SEQ ID NO: 3399 - protein, 16 aa, synthetic construct
  REGION 1..16: note = Synthetic
GTNIWNEIRTWSNWKA

SEQ ID NO: 3400 - protein, 15 aa, synthetic construct
  REGION 1..15: note = Synthetic
DCCSNFCHTWAIMCL

SEQ ID NO: 3401 - protein, 19 aa, synthetic construct
  REGION 1..19: note = Synthetic
CDFCNDVLARAKYFKDHGF

SEQ ID NO: 3402 - protein, 29 aa, synthetic construct
  REGION 1..29: note = Synthetic
KMIKTGAETLVEEAKTLAAALLEEEIMDN

SEQ ID NO: 3403 - protein, 25 aa, synthetic construct
  REGION 1..25: note = Synthetic
WLAGCPSGWHNCKAHGPNIGWCCKK

SEQ ID NO: 3404 - protein, 25 aa, synthetic construct
  REGION 1..25: note = Synthetic
WLAGCPSGWHNCKAHGPNIGWCCKK

SEQ ID NO: 3405 - protein, 24 aa, synthetic construct
  REGION 1..24: note = Synthetic
DNISRVIRQWDTIVQESSGNAPRL

SEQ ID NO: 3406 - protein, 22 aa, synthetic construct
  REGION 1..22: note = Synthetic
TIVEFLNRWITFCQSIISASSS

SEQ ID NO: 3407 - protein, 31 aa, synthetic construct
  REGION 1..31: note = Synthetic
WQVIGQLVSTGLIGLLGPAVIILLALKKGNL

SEQ ID NO: 3408 - protein, 37 aa, synthetic construct
  REGION 1..37: note = Synthetic
VSSGFKTVRNMDGGYIAWVNKRFPVKVEHKELKYDEL

SEQ ID NO: 3409 - protein, 19 aa, synthetic construct
  REGION 1..19: note = Synthetic
EQMREIIQTAITALQSFLP

SEQ ID NO: 3410 - protein, 35 aa, synthetic construct
  REGION 1..35: note = Synthetic
RRLLEAAKEIVSLMHKDYKGMGRRKPPINNHEPSH

SEQ ID NO: 3411 - protein, 36 aa, synthetic construct
  REGION 1..36: note = Synthetic
RDCAGYMRECEEKLCCSGYVCSSRWKWCVLPAPWRR

SEQ ID NO: 3412 - protein, 24 aa, synthetic construct
  REGION 1..24: note = Synthetic
SAWDKAFDDMYKIVFSNLDGNPVH

SEQ ID NO: 3413 - protein, 12 aa, synthetic construct
  REGION 1..12: note = Synthetic
YGEGFRWLSQYI

SEQ ID NO: 3414 - protein, 12 aa, synthetic construct
  REGION 1..12: note = Synthetic
YGEGFRWLSQYI

SEQ ID NO: 3415 - protein, 20 aa, synthetic construct
  REGION 1..20: note = Synthetic
DDLDDYCNGISADCPRNPYY

SEQ ID NO: 3416 - protein, 19 aa, synthetic construct
  REGION 1..19: note = Synthetic
AEQLIEKIKNLWYTKVLGY

SEQ ID NO: 3417 - protein, 39 aa, synthetic construct
  REGION 1..39: note = Synthetic
NEVNECAKAYPNAFIRVIGFDNVRQVQCISFIVHKPEYN

SEQ ID NO: 3418 - protein, 24 aa, synthetic construct
  REGION 1..24: note = Synthetic
FNSASTLASSVLTLVLSFSFALLL

SEQ ID NO: 3419 - protein, 31 aa, synthetic construct
  REGION 1..31: note = Synthetic
ARGLLRGGWNDVDYYYGMDVWGQGTTVTVSS

SEQ ID NO: 3420 - protein, 26 aa, synthetic construct
  REGION 1..26: note = Synthetic
NAMIGVAKSAGKTALNTLACKIDKTC

SEQ ID NO: 3421 - protein, 25 aa, synthetic construct
  REGION 1..25: note = Synthetic
KQFIENGSEFAQKLLKKFSLLKPWA

SEQ ID NO: 3422 - protein, 14 aa, synthetic construct
  REGION 1..14: note = Synthetic
FEELGGSLSRLFTG

SEQ ID NO: 3423 - protein, 25 aa, synthetic construct
  REGION 1..25: note = Synthetic
LATYEKAFKQLFPTRPQCGRDKLQC

SEQ ID NO: 3424 - protein, 19 aa, synthetic construct
  REGION 1..19: note = Synthetic
AWKSCLKGILTKISSRLNA

SEQ ID NO: 3425 - protein, 29 aa, synthetic construct
  REGION 1..29: note = Synthetic
LGKAGGHCEKGVCICRKTSFKDLWDKRFG

SEQ ID NO: 3426 - protein, 29 aa, synthetic construct
  REGION 1..29: note = Synthetic
LGKAGGHCEKGVCICRKTSFKDLWDKRFG

SEQ ID NO: 3427 - protein, 20 aa, synthetic construct
  REGION 1..20: note = Synthetic
RGCSRCCSYAGEAVQTQPGH

SEQ ID NO: 3428 - protein, 20 aa, synthetic construct
  REGION 1..20: note = Synthetic
RGCSRCCSYAGEAVQTQPGH

SEQ ID NO: 3429 - protein, 29 aa, synthetic construct
  REGION 1..29: note = Synthetic
DIIKGCAATCPKVDNNDPIRCCGTDKCND

SEQ ID NO: 3430 - protein, 27 aa, synthetic construct
  REGION 1..27: note = Synthetic
RGLLSVLGSVAKHVLPHVVPVIAEHLG

SEQ ID NO: 3431 - protein, 33 aa, synthetic construct
  REGION 1..33: note = Synthetic
MTEFMNLVEEMGIEEENVQRIMDTDNCPSKIKP

SEQ ID NO: 3432 - protein, 19 aa, synthetic construct
  REGION 1..19: note = Synthetic
LHEMIQQIFNLFSTKDSSA

SEQ ID NO: 3433 - protein, 41 aa, synthetic construct
  REGION 1..41: note = Synthetic
EFMQRALQDLRKTACSLDARTETLLLQAERRALCACWPAGH

SEQ ID NO: 3434 - protein, 20 aa, synthetic construct
  REGION 1..20: note = Synthetic
NQLLELITSILNQLQGFLGR

SEQ ID NO: 3435 - protein, 42 aa, synthetic construct
  REGION 1..42: note = Synthetic
KLCSNGGTECNRHCGQNNTVGICHGQNGKLKCECVEYKRKMF

SEQ ID NO: 3436 - protein, 20 aa, synthetic construct
  REGION 1..20: note = Synthetic
RGCSRCCSYAGEAVQTQPGH

SEQ ID NO: 3437 - protein, 20 aa, synthetic construct
  REGION 1..20: note = Synthetic
RGCSRCCSYAGEAVQTQPGH

SEQ ID NO: 3438 - protein, 15 aa, synthetic construct
  REGION 1..15: note = Synthetic
SDAKKLMRDLKRMLY

SEQ ID NO: 3439 - protein, 42 aa, synthetic construct
  REGION 1..42: note = Synthetic
CYGAAGTCGRIVCDCDRTAALCFGNSEYIEGHKNIDTARFCQ

SEQ ID NO: 3440 - protein, 42 aa, synthetic construct
  REGION 1..42: note = Synthetic
CLKNAARGISGLNAGNAASIPSKCGVSVPYTISTSTDCSRVS

SEQ ID NO: 3441 - protein, 40 aa, synthetic construct
  REGION 1..40: note = Synthetic
QGVRSYLSCWGNRGICLLNRCPGRMRQIGTCLAPRVKCCR

SEQ ID NO: 3442 - protein, 21 aa, synthetic construct
  REGION 1..21: note = Synthetic
CPAGWRKCGAEWPAPCCKAIG

SEQ ID NO: 3443 - protein, 15 aa, synthetic construct
  REGION 1..15: note = Synthetic
VDKIAEKVVEQISKI

SEQ ID NO: 3444 - protein, 41 aa, synthetic construct
  REGION 1..41: note = Synthetic
EFMQRALQDLKKMAYNLDTRTETLLLRAEKRGLCDCFPAMH

SEQ ID NO: 3445 - protein, 36 aa, synthetic construct
  REGION 1..36: note = Synthetic
RDCAGYMRECKEKLCCNGYVCSSRWKWCVLPAPWRR

SEQ ID NO: 3446 - protein, 18 aa, synthetic construct
  REGION 1..18: note = Synthetic
LKCCKAMCGKVCLSPVKA

SEQ ID NO: 3447 - protein, 39 aa, synthetic construct
  REGION 1..39: note = Synthetic
GVMATATSVLAEPHRHQGPIFDTRPSPFNPNQPRPGPIY

SEQ ID NO: 3448 - protein, 22 aa, synthetic construct
  REGION 1..22: note = Synthetic
LRGCASSCPKGYTCCATDLCNW

SEQ ID NO: 3449 - protein, 13 aa, synthetic construct
  REGION 1..13: note = Synthetic
HAINAVSAIAKHS

SEQ ID NO: 3450 - protein, 29 aa, synthetic construct
  REGION 1..29: note = Synthetic
CYSGYNGVGKCFDDPKVAGPSNCGCIYNC

SEQ ID NO: 3451 - protein, 24 aa, synthetic construct
  REGION 1..24: note = Synthetic
CDECCKKAGDRAGTCEYFKCKCNP

SEQ ID NO: 3452 - protein, 16 aa, synthetic construct
  REGION 1..16: note = Synthetic
WSTLMRTVHSVIKRTP

SEQ ID NO: 3453 - protein, 24 aa, synthetic construct
  REGION 1..24: note = Synthetic
WRSAATTLFNSLNQFQHLRMNEVW

SEQ ID NO: 3454 - protein, 23 aa, synthetic construct
  REGION 1..23: note = Synthetic
QHLMRTLLSAAGAPRPAAVPIKP

SEQ ID NO: 3455 - protein, 35 aa, synthetic construct
  REGION 1..35: note = Synthetic
ILAQLWDGLKTAPSPSQETLSSHSPVSRSAGPGVA

SEQ ID NO: 3456 - protein, 25 aa, synthetic construct
  REGION 1..25: note = Synthetic
RKVEQFLDYLEEFLQTVNTEWTVES

SEQ ID NO: 3457 - protein, 16 aa, synthetic construct
  REGION 1..16: note = Synthetic
YKCCEGICGKVCLPPM

SEQ ID NO: 3458 - protein, 39 aa, synthetic construct
  REGION 1..39: note = Synthetic
GDSLHDYCTGVTPDCPRNPNKGESDELEWSAAATGSVLM

SEQ ID NO: 3459 - protein, 18 aa, synthetic construct
  REGION 1..18: note = Synthetic
SAAQSVLKGLSCKLSKDC

SEQ ID NO: 3460 - protein, 18 aa, synthetic construct
  REGION 1..18: note = Synthetic
SAAQSVLKGLSCKLSKDC

SEQ ID NO: 3461 - protein, 21 aa, synthetic construct
  REGION 1..21: note = Synthetic
LRDLRGALESLIEEEARQKKM

SEQ ID NO: 3462 - protein, 37 aa, synthetic construct
  REGION 1..37: note = Synthetic
ITKAAKCAKKIYKRHRFDAWYGWKNHCQGSLPDISSC

SEQ ID NO: 3463 - protein, 28 aa, synthetic construct
  REGION 1..28: note = Synthetic
KKAMQIMDEAVELLRYYATTKEYTNICR

SEQ ID NO: 3464 - protein, 26 aa, synthetic construct
  REGION 1..26: note = Synthetic
ASTCEAGCKQIGKSMKSCQGDTCECA

SEQ ID NO: 3465 - protein, 22 aa, synthetic construct
  REGION 1..22: note = Synthetic
TVVEFLNRWITFCQSSIATMTQ

SEQ ID NO: 3466 - protein, 22 aa, synthetic construct
  REGION 1..22: note = Synthetic
IAKGLNTFVNKVPTFGTFFAGF

SEQ ID NO: 3467 - protein, 42 aa, synthetic construct
  REGION 1..42: note = Synthetic
KAVQQVKDAFSKLQEKGIYKAMSEFDIFINYIEAYMTAKINS

SEQ ID NO: 3468 - protein, 20 aa, synthetic construct
  REGION 1..20: note = Synthetic
LFGVLAKVAAHVVPAIAEHF

SEQ ID NO: 3469 - protein, 31 aa, synthetic construct
  REGION 1..31: note = Synthetic
WQVIGQLIATGAIMLAGPAVIVLLALKKGNL

SEQ ID NO: 3470 - protein, 16 aa, synthetic construct
  REGION 1..16: note = Synthetic
KVAKTVAKQVAKKQME

SEQ ID NO: 3471 - protein, 36 aa, synthetic construct
  REGION 1..36: note = Synthetic
RDCAGYMRECKEELCCSGYVCSSRWKWCVLPAPWRR

SEQ ID NO: 3472 - protein, 16 aa, synthetic construct
  REGION 1..16: note = Synthetic
YGRCYASYYSYKKKTL

SEQ ID NO: 3473 - protein, 20 aa, synthetic construct
  REGION 1..20: note = Synthetic
FCKAIVKSGGKISLKHPGKC

SEQ ID NO: 3474 - protein, 28 aa, synthetic construct
  REGION 1..28: note = Synthetic
GRIAGNCIGTVNPKGATCTYYQRCKRAA

SEQ ID NO: 3475 - protein, 34 aa, synthetic construct
  REGION 1..34: note = Synthetic
RFGRNAWGPWSKEQLSPQAREFWSLAAPQRFGKK

SEQ ID NO: 3476 - protein, 19 aa, synthetic construct
  REGION 1..19: note = Synthetic
AEQLMEKIKNLWYTRILGY

SEQ ID NO: 3477 - protein, 29 aa, synthetic construct
  REGION 1..29: note = Synthetic
IRAAHAILGGLHLTLDWAVRGLLLLKTRL

SEQ ID NO: 3478 - protein, 29 aa, synthetic construct
  REGION 1..29: note = Synthetic
IRAAHAILGGLHLTLDWAVRGLLLLKTRL

SEQ ID NO: 3479 - protein, 33 aa, synthetic construct
  REGION 1..33: note = Synthetic
FEDCLNGFEDVVETCHGVSQGGVMTNGNGEHGG

SEQ ID NO: 3480 - protein, 19 aa, synthetic construct
  REGION 1..19: note = Synthetic
KWVEEAIAYLDMKTSTPKP

SEQ ID NO: 3481 - protein, 36 aa, synthetic construct; identical to SEQ ID NO: 3201
  REGION 1..36: note = Synthetic

SEQ ID NO: 3482 - protein, 24 aa, synthetic construct
  REGION 1..24: note = Synthetic
QVVKRLVRGCWTKSYPPKPCFVRG

SEQ ID NO: 3483 - protein, 19 aa, synthetic construct
  REGION 1..19: note = Synthetic
CDFCNDVLARAKYLKRHGF

SEQ ID NO: 3484 - protein, 11 aa, synthetic construct
  REGION 1..11: note = Synthetic
SALGGLLKKIG

SEQ ID NO: 3485 - protein, 21 aa, synthetic construct
  REGION 1..21: note = Synthetic
GMAALMEELRGLGQGIQGQQY

SEQ ID NO: 3486 - protein, 23 aa, synthetic construct
  REGION 1..23: note = Synthetic
VRNFGNACEKIVHSCKTGETFLD

SEQ ID NO: 3487 - protein, 24 aa, synthetic construct
  REGION 1..24: note = Synthetic
AVEKCVNACSTVCTKGSMNAVEIA

SEQ ID NO: 3488 - protein, 15 aa, synthetic construct
  REGION 1..15: note = Synthetic
KLAQEFVEWLKNGKS

SEQ ID NO: 3489 - protein, 12 aa, synthetic construct
  REGION 1..12: note = Synthetic
EKVQAMVGQYLN

SEQ ID NO: 3490 - protein, 42 aa, synthetic construct
  REGION 1..42: note = Synthetic
CLKNMASSFRNLNMGNAASIPSKCGVSVAFPISTSVDCSKIN

SEQ ID NO: 3491 - protein, 42 aa, synthetic construct; identical to SEQ ID NO: 3490
  REGION 1..42: note = Synthetic

SEQ ID NO: 3492 - protein, 21 aa, synthetic construct
  REGION 1..21: note = Synthetic
SIFRTLASSVGTVLSQISASG

SEQ ID NO: 3493 - protein, 14 aa, synthetic construct
  REGION 1..14: note = Synthetic
FEELGGSLSRLFTG

SEQ ID NO: 3494 - protein, 14 aa, synthetic construct
  REGION 1..14: note = Synthetic
FEELGGSLSRLFTG

SEQ ID NO: 3495 - protein, 15 aa, synthetic construct
  REGION 1..15: note = Synthetic
ARDFLRECMQHLKYA

SEQ ID NO: 3496 - protein, 26 aa, synthetic construct
  REGION 1..26: note = Synthetic
EQFLDYLEEFLRTINIEWNTEWTVES

SEQ ID NO: 3497 - protein, 33 aa, synthetic construct
  REGION 1..33: note = Synthetic
CGSDMSTYANECTLCMKIREGGHNIKIIRNGPC

SEQ ID NO: 3498 - protein, 24 aa, synthetic construct
  REGION 1..24: note = Synthetic
YKSGARIGRNCFCLQKGVIYKRED

SEQ ID NO: 3499 - protein, 15 aa, synthetic construct
  REGION 1..15: note = Synthetic
YGKCMTAFMGKICMR

SEQ ID NO: 3500 - protein, 16 aa, synthetic construct
  REGION 1..16: note = Synthetic
NYYKKLFGSGTTLVVT

SEQ ID NO: 3501 - protein, 24 aa, synthetic construct
  REGION 1..24: note = Synthetic
AVERCNEACYHFCNKEADIVTIVS

SEQ ID NO: 3502 - protein, 17 aa, synthetic construct
  REGION 1..17: note = Synthetic
LDNIRSILDYISKLLGE

SEQ ID NO: 3503 - protein, 17 aa, synthetic construct
  REGION 1..17: note = Synthetic
LDNIRSILDYISKLLGE

SEQ ID NO: 3504 - protein, 24 aa, synthetic construct
  REGION 1..24: note = Synthetic
AVDRCNEACYRFCTNEAEIVTVAS

SEQ ID NO: 3505 - protein, 21 aa, synthetic construct
  REGION 1..21: note = Synthetic
LQNITTFMERLMDLLQKLNST

SEQ ID NO: 3506 - protein, 33 aa, synthetic construct
  REGION 1..33: note = Synthetic
SSLKDYWSTLTGKFSGFWDSTFAVTPTPASEAK

SEQ ID NO: 3507 - protein, 18 aa, synthetic construct
  REGION 1..18: note = Synthetic
GVKKCCEGFCGKDCLYPK

SEQ ID NO: 3508 - protein, 38 aa, synthetic construct
  REGION 1..38: note = Synthetic
MKVVQDIIKKITDAVNPLRMTEGFLGGGGSGGSGALFG

SEQ ID NO: 3509 - protein, 31 aa, synthetic construct
  REGION 1..31: note = Synthetic
QLFKLAKQFCERVNQHPEEPSSPNIATGNGL

SEQ ID NO: 3510 - protein, 25 aa, synthetic construct
  REGION 1..25: note = Synthetic
GLFSVLGAVAKHVLPHVVPVIAEKL

SEQ ID NO: 3511 - protein, 24 aa, synthetic construct
  REGION 1..24: note = Synthetic
GLFSVLGAVAKHVLPHVVPVIAEK

SEQ ID NO: 3512 - protein, 24 aa, synthetic construct
  REGION 1..24: note = Synthetic
GLFSVLGAVAKHVLPHVVPVIAEK

SEQ ID NO: 3513 - protein, 29 aa, synthetic construct
  REGION 1..29: note = Synthetic
EEANYAVDRCNDACHRFCTKEAETVTVVS

SEQ ID NO: 3514 - protein, 18 aa, synthetic construct
  REGION 1..18: note = Synthetic
YVNRMMNYLVSGCTRYPA

SEQ ID NO: 3515 - protein, 36 aa, synthetic construct
  REGION 1..36: note = Synthetic
RDCAGYMRECKGKLCCSGYVCSSRWKWCVLPAPWRR

SEQ ID NO: 3516 - protein, 37 aa, synthetic construct
  REGION 1..37: note = Synthetic
KKAVGGLGKLGKDAVEDLESVGKGAVHDVKDVLDSVL

SEQ ID NO: 3517 - protein, 40 aa, synthetic construct
  REGION 1..40: note = Synthetic
NNIMRTIIEFLSFLHLKEAGALDRLLDLPAAASSEDIERS

SEQ ID NO: 3518 - protein, 22 aa, synthetic construct
  REGION 1..22: note = Synthetic
TVVDFLRRWIAFCQSIISTSPQ

SEQ ID NO: 3519 - protein, 24 aa, synthetic construct
  REGION 1..24: note = Synthetic
IYGGCGGNANKFKTIDECHRTCVG

SEQ ID NO: 3520 - protein, 14 aa, synthetic construct
  REGION 1..14: note = Synthetic
KLLDTLLQNLYDFA

SEQ ID NO: 3521 - protein, 14 aa, synthetic construct
  REGION 1..14: note = Synthetic
WNSCMNQIVSGISG

SEQ ID NO: 3522 - protein, 36 aa, synthetic construct
  REGION 1..36: note = Synthetic
GKALNVAKDFVAEKIGATPAEAGQIPFDEFMNVLYS

SEQ ID NO: 3523 - protein, 22 aa, synthetic construct
  REGION 1..22: note = Synthetic
VSSFLEHVKRCVRHRNFHGTKK

SEQ ID NO: 3524 - protein, 34 aa, synthetic construct
  REGION 1..34: note = Synthetic
RFGRSAWGSWSKEQLNPQARQFWSLAAPQRFGKK

SEQ ID NO: 3525 - protein, 32 aa, synthetic construct
  REGION 1..32: note = Synthetic
EALEKFDKALKALPMHIRLAFNPTQLEGQCHV

SEQ ID NO: 3526 - protein, 16 aa, synthetic construct
  REGION 1..16: note = Synthetic
ALKHFTSLAKTWETAN

SEQ ID NO: 3527 - protein, 20 aa, synthetic construct
  REGION 1..20: note = Synthetic
AVEFLNKWITFCQSIYSTLT

SEQ ID NO: 3528 - protein, 38 aa, synthetic construct
  REGION 1..38: note = Synthetic
DKVREFFKRIKESDIPAKTRNWFSETLQKVKEKLRIES

SEQ ID NO: 3529 - protein, 16 aa, synthetic construct
  REGION 1..16: note = Synthetic
MVYTIDDLIDKLTTLG

SEQ ID NO: 3530 - protein, 20 aa, synthetic construct
  REGION 1..20: note = Synthetic
LAEQLVEKIKNLWYTKVLGY

SEQ ID NO: 3531 - protein, 30 aa, synthetic construct
  REGION 1..30: note = Synthetic
TLVGQLISLFAVVAAGPLVIVFLSARRGAL

SEQ ID NO: 3532 - protein, 37 aa, synthetic construct
  REGION 1..37: note = Synthetic
QCLSPMNHLCHKDADCSGKKRCCPSACGRDCRDPARG

SEQ ID NO: 3533 - protein, 25 aa, synthetic construct
  REGION 1..25: note = Synthetic
EVLALAKEAFTKSKDSGKLYQVIPN

SEQ ID NO: 3534 - protein, 23 aa, synthetic construct
  REGION 1..23: note = Synthetic
GTWHACCNGWQEGRGIRSVSISQ

SEQ ID NO: 3535 - protein, 31 aa, synthetic construct
  REGION 1..31: note = Synthetic
WQVLGQLIATGTIMLAGPAVIVLLALKKGNL

SEQ ID NO: 3536 - protein, 33 aa, synthetic construct
  REGION 1..33: note = Synthetic
VCHNMSTLLREVVEVEDITALIHLGSVMFEMDL

SEQ ID NO: 3537 - protein, 24 aa, synthetic construct
  REGION 1..24: note = Synthetic
VTEVLHQVEEVLKTDDNTYGGLLL

SEQ ID NO: 3538 - protein, 28 aa, synthetic construct
  REGION 1..28: note = Synthetic
LMSTLKGAATNVAVTLLNKLQCKLTGTC

SEQ ID NO: 3539 - protein, 25 aa, synthetic construct
  REGION 1..25: note = Synthetic
IDKAFDYIFEVVDYCVDYKYGLLLC

SEQ ID NO: 3540 - protein, 11 aa, synthetic construct
  REGION 1..11: note = Synthetic
CTRLYAHIPSC

SEQ ID NO: 3541 - protein, 17 aa, synthetic construct
  REGION 1..17: note = Synthetic
LKKLNQIVQKFHQLLQG

SEQ ID NO: 3542 - protein, 38 aa, synthetic construct
  REGION 1..38: note = Synthetic
RGCGGLMDGCDGKSTFCCSGFNCSPTWKWCVYARPGRR

SEQ ID NO: 3543 - protein, 38 aa, synthetic construct; identical to SEQ ID NO: 3542
  REGION 1..38: note = Synthetic

SEQ ID NO: 3544 - protein, 35 aa, synthetic construct
  REGION 1..35: note = Synthetic
QGMGKMERLLASYRGALEPSTPLGDLSGSLGHPVE

SEQ ID NO: 3545 - protein, 42 aa, synthetic construct
  REGION 1..42: note = Synthetic
CLKNLAGSVSGVNPGNAESLPGKCGVNVPYKISTSTNCATVK

SEQ ID NO: 3546 - protein, 22 aa, synthetic construct
  REGION 1..22: note = Synthetic
TNLMDFLSRLMSPEEKPAPAAK

SEQ ID NO: 3547 - protein, 31 aa, synthetic construct
  REGION 1..31: note = Synthetic
NKGMNEFKKILRTLAMPYTVIEVRTRDMCHV

SEQ ID NO: 3548 - protein, 31 aa, synthetic construct
  REGION 1..31: note = Synthetic
ASFLDNAKRYLQVLESKRNCCRRQICCGRTK

SEQ ID NO: 3549 - protein, 26 aa, synthetic construct
  REGION 1..26: note = Synthetic
IYKCVNHVCDSISKVTTDSKEYKNFP

SEQ ID NO: 3550 - protein, 18 aa, synthetic construct
  REGION 1..18: note = Synthetic
GAGQSVLNTLSCKLSKTC

SEQ ID NO: 3551 - protein, 18 aa, synthetic construct
  REGION 1..18: note = Synthetic
GAGQSVLNTLSCKLSKTC

SEQ ID NO: 3552 - protein, 24 aa, synthetic construct
  REGION 1..24: note = Synthetic
YKSGAQIGRNCFCLQKGVIYKREN

SEQ ID NO: 3553 - protein, 24 aa, synthetic construct
  REGION 1..24: note = Synthetic
YKSGAQIGRNCFCLQKGVIYKREN

SEQ ID NO: 3554 - protein, 18 aa, synthetic construct
  REGION 1..18: note = Synthetic
LKKYLEALDNFLNFKNKP

SEQ ID NO: 3555 - protein, 32 aa, synthetic construct; identical to SEQ ID NO: 3525
  REGION 1..32: note = Synthetic

SEQ ID NO: 3556 - protein, 24 aa, synthetic construct
  REGION 1..24: note = Synthetic
AVEKCATACSSFCTKGSTTKAETA

SEQ ID NO: 3557 - protein, 17 aa, synthetic construct
  REGION 1..17: note = Synthetic
LLDDVGNILNEVLNLLN

SEQ ID NO: 3558 - protein, 27 aa, synthetic construct
  REGION 1..27: note = Synthetic
DLQHAWNDAFDNLYYIVFSNLDGHPVA

SEQ ID NO: 3559 - protein, 38 aa, synthetic construct
  REGION 1..38: note = Synthetic
RGCGGLMAGCGGKSTFCCSGYNCSPTWKWCVYARPGRR

SEQ ID NO: 3560 - protein, 24 aa, synthetic construct
  REGION 1..24: note = Synthetic
LYGGCGGNANNFKTIKECESTCAA

SEQ ID NO: 3561 - protein, 41 aa, synthetic construct
  REGION 1..41: note = Synthetic
GLWKSAIGKLFSFGGLGVWTLVDVVLIAVGYIKPYDGSMYI

SEQ ID NO: 3562 - protein, 32 aa, synthetic construct
  REGION 1..32: note = Synthetic
REAEQAWKEMQEALREDHIKTKPEGSQLNHDI

SEQ ID NO: 3563 - protein, 14 aa, synthetic construct
  REGION 1..14: note = Synthetic
CDRIGGNFCTCVPN

SEQ ID NO: 3564 - protein, 24 aa, synthetic construct
  REGION 1..24: note = Synthetic
SLVEIINNAMYDVIYDYVNRTYVT

SEQ ID NO: 3565 - protein, 42 aa, synthetic construct
  REGION 1..42: note = Synthetic
CHRACGTCCARCNCVAPGTSGNYDKCPCYGSLTTHGGRRKCP

SEQ ID NO: 3566 - protein, 22 aa, synthetic construct
  REGION 1..22: note = Synthetic
TVVEFLSRWITFCQSAISTMTQ

SEQ ID NO: 3567 - protein, 22 aa, synthetic construct
  REGION 1..22: note = Synthetic
TVVEFLSRWITFCQSAISTMTQ

SEQ ID NO: 3568 - protein, 15 aa, synthetic construct
  REGION 1..15: note = Synthetic
VEDFVNSAQEIVETF

SEQ ID NO: 3569 - protein, 16 aa, synthetic construct
  REGION 1..16: note = Synthetic
KVAKKLVSHVAQKQLE

SEQ ID NO: 3570 - protein, 31 aa, synthetic construct
  REGION 1..31: note = Synthetic
DILDKVENAIHNAAQVGIGFAKPFEKLINPK

SEQ ID NO: 3571 - protein, 31 aa, synthetic construct; identical to SEQ ID NO: 3570
  REGION 1..31: note = Synthetic

SEQ ID NO: 3572 - protein, 12 aa, synthetic construct
  REGION 1..12: note = Synthetic
GLPKVMNDAGRR

SEQ ID NO: 3573 - protein, 34 aa, synthetic construct
  REGION 1..34: note = Synthetic
NFNEALKNGGTTLSKKTVLLLVIPFLVAAWSLHP

SEQ ID NO: 3574 - protein, 21 aa, synthetic construct
  REGION 1..21: note = Synthetic
ATLANEVKTMAEALVEEDMME

SEQ ID NO: 3575 - protein, 27 aa, synthetic construct
  REGION 1..27: note = Synthetic
HAFEFMQRALQDLKKTAYNLDTRVRKL

SEQ ID NO: 3576 - protein, 22 aa, synthetic construct
  REGION 1..22: note = Synthetic
QKMLTILHKILEKMVDKNYPKK

SEQ ID NO: 3577 - protein, 25 aa, synthetic construct
  REGION 1..25: note = Synthetic
WLAGCPSGWHNCKAHGPTIGWCCKK

SEQ ID NO: 3578 - protein, 33 aa, synthetic construct
  REGION 1..33: note = Synthetic
KSLKGYWSKFTDKFTGLWESGPEDQLTTPTLEP

SEQ ID NO: 3579 - protein, 26 aa, synthetic construct
  REGION 1..26: note = Synthetic
RLVDEARKLFDSMPYRSVVTWNALIA

SEQ ID NO: 3580 - protein, 26 aa, synthetic construct
  REGION 1..26: note = Synthetic
FTEALKKVKTLLNDIRRMMSSDEFED

SEQ ID NO: 3581 - protein, 20 aa, synthetic construct
  REGION 1..20: note = Synthetic
FCKAVMKSGGKINLKHRGKC

SEQ ID NO: 3582 - protein, 35 aa, synthetic construct
  REGION 1..35: note = Synthetic
VDSFQEIAKEIHHLAEPQHSESAFHQPCSPLSDLR

SEQ ID NO: 3583 - protein, 24 aa, synthetic construct
  REGION 1..24: note = Synthetic
IYGGCGGNANKFKTIEECHRTCVG

SEQ ID NO: 3584 - protein, 20 aa, synthetic construct
  REGION 1..20: note = Synthetic
LAEQLMEKIKNLWYTRVLGY

SEQ ID NO: 3585 - protein, 20 aa, synthetic construct
  REGION 1..20: note = Synthetic
LAEQLMEKIKNLWYTRVLGY

SEQ ID NO: 3586 - protein, 20 aa, synthetic construct
  REGION 1..20: note = Synthetic
LAEQLMEKIKNLWYTRVLGY

SEQ ID NO: 3587 - protein, 21 aa, synthetic construct
  REGION 1..21: note = Synthetic
KNIKEFLQSFVHIVQMFINPS

SEQ ID NO: 3588 - protein, 29 aa, synthetic construct
  REGION 1..29: note = Synthetic
EDCEQWWEDCQEALTCKVNWHKGWNWTSG

SEQ ID NO: 3589 - protein, 17 aa, synthetic construct
  REGION 1..17: note = Synthetic
MEECVSTCTNMVYDKRS

SEQ ID NO: 3590 - protein, 20 aa, synthetic construct
  REGION 1..20: note = Synthetic
LAEQLMEKIKNLWYTKVLGY

SEQ ID NO: 3591 - protein, 20 aa, synthetic construct
  REGION 1..20: note = Synthetic
LAEQLMEKIKNLWYTKVLGY

SEQ ID NO: 3592 - protein, 20 aa, synthetic construct
  REGION 1..20: note = Synthetic
LAEQLMEKIKNLWYTKVLGY

SEQ ID NO: 3593 - protein, 20 aa, synthetic construct
  REGION 1..20: note = Synthetic
LAEQLMEKIKNLWYTKVLGY

SEQ ID NO: 3594 - protein, 20 aa, synthetic construct
  REGION 1..20: note = Synthetic
LAEQLMEKIKNLWYTKVLGY

SEQ ID NO: 3595 - protein, 40 aa, synthetic construct
  REGION 1..40: note = Synthetic
LGGIFGIGGGAVFKQIQRAQILPSKCNMGVDCRFPSGYYW

SEQ ID NO: 3596 - protein, 12 aa, synthetic construct
  REGION 1..12: note = Synthetic
GLPKVMNDAGRR

SEQ ID NO: 3597 - protein, 24 aa, synthetic construct
  REGION 1..24: note = Synthetic
AVKKCIKTCSNLCTKGSVTAFQTA

SEQ ID NO: 3598 - protein, 21 aa, synthetic construct
  REGION 1..21: note = Synthetic
GWEKCTAVYTAVASCCRKKKG

SEQ ID NO: 3599 - protein, 21 aa, synthetic construct
  REGION 1..21: note = Synthetic
DNFGAQLQNLLKKKMILEMIN

SEQ ID NO: 3600 - protein, 12 aa, synthetic construct
  REGION 1..12: note = Synthetic
GLPKLLNDAGRK

SEQ ID NO: 3601 - protein, 12 aa, synthetic construct
  REGION 1..12: note = Synthetic
VLNSLDNLVSGL

SEQ ID NO: 3602 - protein, 42 aa, synthetic construct
  REGION 1..42: note = Synthetic
CIKSAAAGITGINFGLASGLPGKCGVNIPYKISPSTDCNSVK

SEQ ID NO: 3603 - protein, 42 aa, synthetic construct; identical to SEQ ID NO: 3602
  REGION 1..42: note = Synthetic

SEQ ID NO: 3604 - protein, 22 aa, synthetic construct
  REGION 1..22: note = Synthetic
WYSFLEELHSAFQQIAGEAESK

SEQ ID NO: 3605 - protein, 40 aa, synthetic construct
  REGION 1..40: note = Synthetic
KWVKAAIKTVDGRASTRKNMAETVPTGAQRSTSTAITLTG

SEQ ID NO: 3606 - protein, 13 aa, synthetic construct
  REGION 1..13: note = Synthetic
KSLREMAAAAFGR

SEQ ID NO: 3607 - protein, 13 aa, synthetic construct
  REGION 1..13: note = Synthetic
RALEKLASSFRCE

SEQ ID NO: 3608 - protein, 20 aa, synthetic construct
  REGION 1..20: note = Synthetic
AVYSSGFHKVFAEGTKLIVI

SEQ ID NO: 3609 - protein, 21 aa, synthetic construct
  REGION 1..21: note = Synthetic
NAVEFLNKWITFCQSIYSTMT

SEQ ID NO: 3610 - protein, 21 aa, synthetic construct
  REGION 1..21: note = Synthetic
NAVEFLNKWITFCQSIYSTMT

SEQ ID NO: 3611 - protein, 15 aa, synthetic construct
  REGION 1..15: note = Synthetic
VTRAPHVLNDLLLKF

SEQ ID NO: 3612 - protein, 16 aa, synthetic construct
  REGION 1..16: note = Synthetic
KVAKKLVSHVAQKQLE

SEQ ID NO: 3613 - protein, 31 aa, synthetic construct
  REGION 1..31: note = Synthetic
KQIMQAISEMMNECPDRDYQGWVDFGRRSAE

SEQ ID NO: 3614 - protein, 18 aa, synthetic construct
  REGION 1..18: note = Synthetic
RDAGKLLRSLKKLKLTTH

SEQ ID NO: 3615 - protein, 41 aa, synthetic construct
  REGION 1..41: note = Synthetic
DYYGDGAARLGYFPSSIVREDQTLKPAKTDVKTDIWDFYCQ

SEQ ID NO: 3616 - protein, 32 aa, synthetic construct
  REGION 1..32: note = Synthetic
VSQFCATLSELKCWINNICFWSTADKKCKPLH

SEQ ID NO: 3617 - protein, 21 aa, synthetic construct
  REGION 1..21: note = Synthetic
LLGQALTSLTTVDRTGNGAFW

SEQ ID NO: 3618 - protein, 21 aa, synthetic construct
  REGION 1..21: note = Synthetic
LLGQALTSLTTVDRTGNGAFW

SEQ ID NO: 3619 - protein, 21 aa, synthetic construct
  REGION 1..21: note = Synthetic
LLGQALTSLTTVDRTGNGAFW

SEQ ID NO: 3620 - protein, 21 aa, synthetic construct
  REGION 1..21: note = Synthetic
LLGQALTSLTTVDRTGNGAFW

SEQ ID NO: 3621 - protein, 20 aa, synthetic construct
  REGION 1..20: note = Synthetic
LAEQLMEKIRNLWYTKVLGY

SEQ ID NO: 3622 - protein, 24 aa, synthetic construct
  REGION 1..24: note = Synthetic
LKKGVQIARQCFCLEKDVVYKKHI

SEQ ID NO: 3623 - protein, 24 aa, synthetic construct
  REGION 1..24: note = Synthetic
LKKGVQIARQCFCLEKDVVYKKHI

SEQ ID NO: 3624 - protein, 20 aa, synthetic construct
  REGION 1..20: note = Synthetic
LLDFVTGVGKDIFAQLIKQI

SEQ ID NO: 3625 - protein, 20 aa, synthetic construct
  REGION 1..20: note = Synthetic
LAEQLMEKIKNLWYTKVLGY

SEQ ID NO: 3626 - protein, 20 aa, synthetic construct
  REGION 1..20: note = Synthetic
LAEQLMEKIKNLWYTKVLGY

SEQ ID NO: 3627 - protein, 20 aa, synthetic construct
  REGION 1..20: note = Synthetic
LAEQLMEKIKNLWYTKVLGY

SEQ ID NO: 3628 - protein, 34 aa, synthetic construct
  REGION 1..34: note = Synthetic
IHDLTTFLDTLIKSCHDPLPTWETISNETINWEK

SEQ ID NO: 3629 - protein, 35 aa, synthetic construct
  REGION 1..35: note = Synthetic
RLCRHFVHELKQALTSEMAAKHHQELDKPPLYDEE

SEQ ID NO: 3630 - protein, 11 aa, synthetic construct
  REGION 1..11: note = Synthetic
EVCDGFCRLWE

SEQ ID NO: 3631 - protein, 28 aa, synthetic construct
  REGION 1..28: note = Synthetic
VVTLMDDVMDALTRLIKKTEEDLKKMNR

SEQ ID NO: 3632 - protein, 23 aa, synthetic construct
  REGION 1..23: note = Synthetic
LAHRCSKAIDDAEELVKVMAEKQ

SEQ ID NO: 3633 - protein, 23 aa, synthetic construct
  REGION 1..23: note = Synthetic
LAHRCSKAIDDAEELVKVMAEKQ

SEQ ID NO: 3634 - protein, 41 aa, synthetic construct
  REGION 1..41: note = Synthetic
ISQGNGGLSKFNQNGLEMKNLSFVKLIGVSFIAFISFILLI

SEQ ID NO: 3635 - protein, 41 aa, synthetic construct; identical to SEQ ID NO: 3634
  REGION 1..41: note = Synthetic

SEQ ID NO: 3636 - protein, 35 aa, synthetic construct
  REGION 1..35: note = Synthetic
RLCRHFVHELKQALTSEMAAKHHQDLDKPPLYDEE

SEQ ID NO: 3637 - protein, 17 aa, synthetic construct
  REGION 1..17: note = Synthetic
KRAADALTKAATAVESH

SEQ ID NO: 3638 - protein, 27 aa, synthetic construct
  REGION 1..27: note = Synthetic
AENLVESFQEIANEMEKFGEAERSECS

SEQ ID NO: 3639 - protein, 22 aa, synthetic construct
  REGION 1..22: note = Synthetic
DNVAAAWNKALDNTFAIVVPRL

SEQ ID NO: 3640 - protein, 22 aa, synthetic construct
  REGION 1..22: note = Synthetic
DNVAAAWNKALDNTFAIVVPRL

SEQ ID NO: 3641 - protein, 21 aa, synthetic construct
  REGION 1..21: note = Synthetic
IKDVEEVVSDIIDKVTDAEKN

SEQ ID NO: 3642 - protein, 20 aa, synthetic construct
  REGION 1..20: note = Synthetic
LAEQLMEKIKNLWYTRVLGY

SEQ ID NO: 3643 - protein, 20 aa, synthetic construct
  REGION 1..20: note = Synthetic
LAEQLMEKIKNLWYTRVLGY

SEQ ID NO: 3644 - protein, 20 aa, synthetic construct
  REGION 1..20: note = Synthetic
LAEQLMEKIKNLWYTRVLGY

SEQ ID NO: 3645 - protein, 20 aa, synthetic construct
  REGION 1..20: note = Synthetic
LAEQLMEKIKNLWYTRVLGY

SEQ ID NO: 3646 - protein, 20 aa, synthetic construct
  REGION 1..20: note = Synthetic
LAEQLMEKIKNLWYTRVLGY

SEQ ID NO: 3647 - protein, 16 aa, synthetic construct
  REGION 1..16: note = Synthetic
IGECVKDVLYNCHTIL

SEQ ID NO: 3648 - protein, 15 aa, synthetic construct
  REGION 1..15: note = Synthetic
QFFDAYKTYCKNSRI

SEQ ID NO: 3649 - protein, 17 aa, synthetic construct
  REGION 1..17: note = Synthetic
WDHAVQRVDEMLDELMH

SEQ ID NO: 3650 - protein, 20 aa, synthetic construct
  REGION 1..20: note = Synthetic
LAEQLMEKIKNLWYTKVLGY

SEQ ID NO: 3651 - protein, 20 aa, synthetic construct
  REGION 1..20: note = Synthetic
LAEQLMEKIKNLWYTKVLGY

SEQ ID NO: 3652 - protein, 24 aa, synthetic construct
  REGION 1..24: note = Synthetic
YKSGAQIGRNCFCLQKGVIYKREN

SEQ ID NO: 3653 - protein, 30 aa, synthetic construct
  REGION 1..30: note = Synthetic
ILDKMENAIHKAAQAGIGLAKPIENMILPK

SEQ ID NO: 3654 - protein, 26 aa, synthetic construct
  REGION 1..26: note = Synthetic
NHAVDRCNEACYRFCTNEAEIVTVAS

SEQ ID NO: 3655 - protein, 37 aa, synthetic construct
  REGION 1..37: note = Synthetic
FKGARDCGGQGKGCYTQPCCPGLRCRGGGTGGGVCQP

SEQ ID NO: 3656 - protein, 24 aa, synthetic construct
  REGION 1..24: note = Synthetic
FLRELISNASDACDKKRIGLENEK

SEQ ID NO: 3657 - protein, 30 aa, synthetic construct
  REGION 1..30: note = Synthetic
GKEGMGAWPTWSRYCQYSDTLARWLDGCKL

SEQ ID NO: 3658 - protein, 42 aa, synthetic construct
  REGION 1..42: note = Synthetic
CLKNLAGSISGVNPNNAAGLPGKCGVNVPYKISTSTNCATVK

SEQ ID NO: 3659 - protein, 39 aa, synthetic construct
  REGION 1..39: note = Synthetic
RLIDAMRNFGDTRSCGRRGKPCPCCRGFRCTGSFCRKWQ

SEQ ID NO: 3660 - protein, 29 aa, synthetic construct
  REGION 1..29: note = Synthetic
SSLKDYWSSFKGKFTDFWESATSPTQSPP

SEQ ID NO: 3661 - protein, 13 aa, synthetic construct
  REGION 1..13: note = Synthetic
AGPVSKLVSGIGL

SEQ ID NO: 3662 - protein, 17 aa, synthetic construct
  REGION 1..17: note = Synthetic
VDNIRSILDYISRLLGE

SEQ ID NO: 3663 - protein, 17 aa, synthetic construct
  REGION 1..17: note = Synthetic
VDNIRSILDYISRLLGE

SEQ ID NO: 3664 - protein, 27 aa, synthetic construct
  REGION 1..27: note = Synthetic
ADQAANEWGRSGKDPNHFRPAGLPSKY

SEQ ID NO: 3665 - protein, 39 aa, synthetic construct
  REGION 1..39: note = Synthetic
CVKKWEGGGRRVTQYCSHACAIPASYEFVHCCQTDKCNG

SEQ ID NO: 3666 - protein, 14 aa, synthetic construct
  REGION 1..14: note = Synthetic
LKEFAGGLVTGVQS

SEQ ID NO: 3667 - protein, 35 aa, synthetic construct
  REGION 1..35: note = Synthetic
IIENLLSIFKEWVSKKMFHYPPQDLVQVYRRISFN

SEQ ID NO: 3668 - protein, 32 aa, synthetic construct
  REGION 1..32: note = Synthetic
TTAFSSVTHICRDVNYGWLIRYMHANGASMFF

SEQ ID NO: 3669 - protein, 32 aa, synthetic construct; identical to SEQ ID NO: 3668
  REGION 1..32: note = Synthetic

SEQ ID NO: 3670 - protein, 32 aa, synthetic construct; identical to SEQ ID NO: 3668
  REGION 1..32: note = Synthetic

SEQ ID NO: 3671 - protein, 24 aa, synthetic construct
  REGION 1..24: note = Synthetic
FTYFFDRAVERIQDIISSYTMIPL

SEQ ID NO: 3672 - protein, 34 aa, synthetic construct
  REGION 1..34: note = Synthetic
KRFLSTLLNVASKVVPTLFCKITKKMLKLRLEII

SEQ ID NO: 3673 - protein, 21 aa, synthetic construct
  REGION 1..21: note = Synthetic
LGKAWDTAFDKMYSIVFTKLH

SEQ ID NO: 3674 - protein, 42 aa, synthetic construct
  REGION 1..42: note = Synthetic
CLKNVAGSISGLNAGNAASIPSKCGVSIPYTISPSIDCSSVN

SEQ ID NO: 3675 - protein, 42 aa, synthetic construct; identical to SEQ ID NO: 3674
  REGION 1..42: note = Synthetic

SEQ ID NO: 3676 - protein, 42 aa, synthetic construct; identical to SEQ ID NO: 3674
  REGION 1..42: note = Synthetic

SEQ ID NO: 3677 - protein, 24 aa, synthetic construct
  REGION 1..24: note = Synthetic
YKSGAQIGRNCFCLQKGVIYKREN

SEQ ID NO: 3678 - protein, 24 aa, synthetic construct
  REGION 1..24: note = Synthetic
YKSGAQIGRNCFCLQKGVIYKREN

SEQ ID NO: 3679 - protein, 24 aa, synthetic construct
  REGION 1..24: note = Synthetic
YKSGAQIGRNCFCLQKGVIYKREN

SEQ ID NO: 3680 - protein, 24 aa, synthetic construct
  REGION 1..24: note = Synthetic
YKSGAQIGRNCFCLQKGVIYKREN

SEQ ID NO: 3681 - protein, 24 aa, synthetic construct
  REGION 1..24: note = Synthetic
YKSGAQIGRNCFCLQKGVIYKREN

SEQ ID NO: 3682 - protein, 24 aa, synthetic construct
  REGION 1..24: note = Synthetic
YKSGAQIGRNCFCLQKGVIYKREN

SEQ ID NO: 3683 - protein, 12 aa, synthetic construct
  REGION 1..12: note = Synthetic
FQEAYRRFYGPV

SEQ ID NO: 3684 - protein, 12 aa, synthetic construct
  REGION 1..12: note = Synthetic
FQEAYRRFYGPV

SEQ ID NO: 3685 - protein, 12 aa, synthetic construct
  REGION 1..12: note = Synthetic
FQEAYRRFYGPV

SEQ ID NO: 3686 - protein, 23 aa, synthetic construct
  REGION 1..23: note = Synthetic
CSRCCSYAGQAVQTQQQSTEPGH

SEQ ID NO: 3687 - protein, 36 aa, synthetic construct
  REGION 1..36: note = Synthetic
KSITKCMEKAPEELCAYSFRLVMCAFKAGHPVIDSE

SEQ ID NO: 3688 - protein, 38 aa, synthetic construct
  REGION 1..38: note = Synthetic
TEWCRLFEGFCHDKNCPPPTSHVGSCHPEKRSCCKDRR

SEQ ID NO: 3689 - protein, 32 aa, synthetic construct
  REGION 1..32: note = Synthetic
LGKRGLNDLSDLDELFDGEISKADLDFLREIM

SEQ ID NO: 3690 - protein, 19 aa, synthetic construct
  REGION 1..19: note = Synthetic
GWHKCIATYTAVASCCKKD

SEQ ID NO: 3691 - protein, 31 aa, synthetic construct
  REGION 1..31: note = Synthetic
GMKTVRGCADTCANPGENEKVTYCSTDNCNS

SEQ ID NO: 3692 - protein, 42 aa, synthetic construct
  REGION 1..42: note = Synthetic
ITQAVACAKRVVSDPQGIRAWVAWRSHCQNQDLTSYIQGCGV

SEQ ID NO: 3693 - protein, 23 aa, synthetic construct
  REGION 1..23: note = Synthetic
GQALGKFLQDVLWEEADEVLADE

SEQ ID NO: 3694 - protein, 27 aa, synthetic construct
  REGION 1..27: note = Synthetic
LTTVLDQYSNYKPMGWKCHCNGHFYNP

SEQ ID NO: 3695 - protein, 18 aa, synthetic construct
  REGION 1..18: note = Synthetic
LRTVTELLKKVVDAAKKD

SEQ ID NO: 3696 - protein, 29 aa, synthetic construct
  REGION 1..29: note = Synthetic
ECDRIGAQCFADKRSTFNRSLISYTKDKC

SEQ ID NO: 3697 - protein, 31 aa, synthetic construct
  REGION 1..31: note = Synthetic
DKCTTFCRSLPNKYDFGVCDKIYACCCHINV

SEQ ID NO: 3698 - protein, 40 aa, synthetic construct
  REGION 1..40: note = Synthetic
SYVGDCGSNGGSCVSSYCPYGNRLNYFCPLGRTCCRHAYV

SEQ ID NO: 3699 - protein, 17 aa, synthetic construct
  REGION 1..17: note = Synthetic
EEVDEILRKAEEDREDM

SEQ ID NO: 3700 - protein, 24 aa, synthetic construct
  REGION 1..24: note = Synthetic
AVEKCANVCSTVCTKGSMNAVEIA

SEQ ID NO: 3701 - protein, 18 aa, synthetic construct
  REGION 1..18: note = Synthetic
GIYNDCCNACDPAKKTCT

SEQ ID NO: 3702 - protein, 24 aa, synthetic construct
  REGION 1..24: note = Synthetic
CDECCKKAGDRAGTCEYFKCKCNP

SEQ ID NO: 3703 - protein, 41 aa, synthetic construct
  REGION 1..41: note = Synthetic
NTLARNCYNACRFTGGSQPTCGILCDCIHVTTTTCPSSHPS

SEQ ID NO: 3704 - protein, 26 aa, synthetic construct
  REGION 1..26: note = Synthetic
VDECQQVLHNLVSACPQASIFSRLQE

SEQ ID NO: 3705 - protein, 33 aa, synthetic construct
  REGION 1..33: note = Synthetic
AAKDGGGKIKNYEAVVVEKLWLHSKSLESFKAL

SEQ ID NO: 3706 - protein, 34 aa, synthetic construct
  REGION 1..34: note = Synthetic
DCAKLIRSLIEIADQLDDDLDATPEELCKFVYFC

SEQ ID NO: 3707 - protein, 14 aa, synthetic construct
  REGION 1..14: note = Synthetic
IFRNLPDLVETIMQ

SEQ ID NO: 3708 - protein, 23 aa, synthetic construct
  REGION 1..23: note = Synthetic
SQFEDFVKDLERLVQLINASGDK

SEQ ID NO: 3709 - protein, 40 aa, synthetic construct
  REGION 1..40: note = Synthetic
DVLEEFGKTLEDNVREFINLITQSELPAKTRDWFSEIFGK

SEQ ID NO: 3710 - protein, 17 aa, synthetic construct
  REGION 1..17: note = Synthetic
LDNIRSILDYISKLLGE

SEQ ID NO: 3711 - protein, 24 aa, synthetic construct
  REGION 1..24: note = Synthetic
VVERCNEACYHFCNKKADIVTVVS

SEQ ID NO: 3712 - protein, 24 aa, synthetic construct
  REGION 1..24: note = Synthetic
VVERCNEACYHFCNKKADIVTVVS

SEQ ID NO: 3713 - protein, 42 aa, synthetic construct
  REGION 1..42: note = Synthetic
GMFNKAYRKALGQLSARKYLHTLMAKRVGGGSMIEDDNEPLS

SEQ ID NO: 3714 - protein, 23 aa, synthetic construct
  REGION 1..23: note = Synthetic
EEIKRVVEKMFKKFRCGLSGNDC

SEQ ID NO: 3715 - protein, 24 aa, synthetic construct
  REGION 1..24: note = Synthetic
DNVAAAWTHALDNVYTAVFQIVTA

SEQ ID NO: 3716 - protein, 31 aa, synthetic construct
  REGION 1..31: note = Synthetic
DNLVDALTRLARGLKAQTSPEQLCGLLKICK

SEQ ID NO: 3717 - protein, 19 aa, synthetic construct
  REGION 1..19: note = Synthetic
NGLISLMTTMAATPVSPTT

SEQ ID NO: 3718 - protein, 21 aa, synthetic construct
  REGION 1..21: note = Synthetic
ALQKYLESILGSSTSPRPPSS

SEQ ID NO: 3719 - protein, 21 aa, synthetic construct
  REGION 1..21: note = Synthetic
ALQKYLESILGSSTSPRPPSS

SEQ ID NO: 3720 - protein, 26 aa, synthetic construct
  REGION 1..26: note = Synthetic
VLKLWNSVLKHICNLSNDIKRIIKQS

SEQ ID NO: 3721 - protein, 14 aa, synthetic construct
  REGION 1..14: note = Synthetic
GCWAKYKHLCGRKR

SEQ ID NO: 3722 - protein, 27 aa, synthetic construct
  REGION 1..27: note = Synthetic
ADQAANEWGRSGKDPNHFRPPGLPDKY

SEQ ID NO: 3723 - protein, 27 aa, synthetic construct
  REGION 1..27: note = Synthetic
ADQAANEWGRSGKDPNHFRPSGLPDKY

SEQ ID NO: 3724 - protein, 32 aa, synthetic construct
  REGION 1..32: note = Synthetic
GGDVFKQIQRAQILPSKCNMGADCKFPSGYYW

SEQ ID NO: 3725 - protein, 37 aa, synthetic construct
  REGION 1..37: note = Synthetic
RECGGLMTRCDGKTTFCCSGMNCSPTWKWCVYAPGRR

SEQ ID NO: 3726 - protein, 32 aa, synthetic construct
  REGION 1..32: note = Synthetic
VEEVWNKCVNFCTDNGARLGYCFGVACHCLYY

SEQ ID NO: 3727 - protein, 25 aa, synthetic construct
  REGION 1..25: note = Synthetic
GLLSVLGSVVKHVIPHVVPVIAEHL

SEQ ID NO: 3728 - protein, 29 aa, synthetic construct
  REGION 1..29: note = Synthetic
FHDCEDAARELQSQIQEARADLARRGLRF

SEQ ID NO: 3729 - protein, 20 aa, synthetic construct
  REGION 1..20: note = Synthetic
AVEFLNKWITFCQSIYSTLT

SEQ ID NO: 3730 - protein, 20 aa, synthetic construct
  REGION 1..20: note = Synthetic
AVEFLNKWITFCQSIYSTLT

SEQ ID NO: 3731 - protein, 37 aa, synthetic construct
  REGION 1..37: note = Synthetic
HCLSPMNHLCHKDSDCSGKKRCCHSACGRDCRDPARG

SEQ ID NO: 3732 - protein, 33 aa, synthetic construct
  REGION 1..33: note = Synthetic
EEIMEKFRRALQPLPGRVQIVPDLTRMAERCRI

SEQ ID NO: 3733 - protein, 15 aa, synthetic construct
  REGION 1..15: note = Synthetic
CGDAHHFYRGCTCTC

SEQ ID NO: 3734 - protein, 24 aa, synthetic construct
  REGION 1..24: note = Synthetic
AVERCNEACYHFCNKEADIVTIVS

SEQ ID NO: 3735 - protein, 12 aa, synthetic construct
  REGION 1..12: note = Synthetic
FQDAYRRFYGTV

SEQ ID NO: 3736 - protein, 26 aa, synthetic construct
  REGION 1..26: note = Synthetic
DLCEAACKDLGKPMDFCKDGTCKCKD

SEQ ID NO: 3737 - protein, 42 aa, synthetic construct
  REGION 1..42: note = Synthetic
ALKEAKDLIEGLPKKVKEGVSKDEAEDAKKQLEEVGAKVSIA

SEQ ID NO: 3738 - protein, 21 aa, synthetic construct
  REGION 1..21: note = Synthetic
ATEWLKNLVEIAEKQQKAAPK

SEQ ID NO: 3739 - protein, 12 aa, synthetic construct
  REGION 1..12: note = Synthetic
EAYEKYIKSIEE

SEQ ID NO: 3740 - protein, 42 aa, synthetic construct
  REGION 1..42: note = Synthetic
CLKGIARGIHNLNLNNAASIPSKCNVNVPYTISPDIDCSRIY

SEQ ID NO: 3741 - protein, 31 aa, synthetic construct
  REGION 1..31: note = Synthetic
FEQVKEMLNNLFEAADDNTGQLHLNLGNDDL

SEQ ID NO: 3742 - protein, 12 aa, synthetic construct
  REGION 1..12: note = Synthetic
FQEAYRRFYGPV

SEQ ID NO: 3743 - protein, 12 aa, synthetic construct
  REGION 1..12: note = Synthetic
FQEAYRRFYGPV

SEQ ID NO: 3744 - protein, 12 aa, synthetic construct
  REGION 1..12: note = Synthetic
FQEAYRRFYGPV

SEQ ID NO: 3745 - protein, 12 aa, synthetic construct
  REGION 1..12: note = Synthetic
FQEAYRRFYGPV

SEQ ID NO: 3746 - protein, 12 aa, synthetic construct
  REGION 1..12: note = Synthetic
FQEAYRRFYGPV

SEQ ID NO: 3747 - protein, 12 aa, synthetic construct
  REGION 1..12: note = Synthetic
FQEAYRRFYGPV

SEQ ID NO: 3748 - protein, 12 aa, synthetic construct
  REGION 1..12: note = Synthetic
FQEAYRRFYGPV

SEQ ID NO: 3749 - protein, 12 aa, synthetic construct
  REGION 1..12: note = Synthetic
FQEAYRRFYGPV

SEQ ID NO: 3750 - protein, 26 aa, synthetic construct
  REGION 1..26: note = Synthetic
KRFLSTLLNVASKVVPTLFCKITKKC

SEQ ID NO: 3751 - protein, 26 aa, synthetic construct
  REGION 1..26: note = Synthetic
KRFLSTLLNVASKVVPTLFCKITKKC

SEQ ID NO: 3752 - protein, 17 aa, synthetic construct
  REGION 1..17: note = Synthetic
ILDVITDAVNSAMNAMG

SEQ ID NO: 3753 - protein, 31 aa, synthetic construct
  REGION 1..31: note = Synthetic
STAFSSVTHICRDVNYGWLIRYMHANGASMF

SEQ ID NO: 3754 - protein, 31 aa, synthetic construct
  REGION 1..31: note = Synthetic
GMKTVRGCAKTCATPGENEKITYCSTDNCNI

SEQ ID NO: 3755 - protein, 15 aa, synthetic construct
  REGION 1..15: note = Synthetic
LKCLNGVCTKVTPRR

SEQ ID NO: 3756 - protein, 26 aa, synthetic construct
  REGION 1..26: note = Synthetic
TTAFSSVTHICRDVNYGWLIRYMHAN

SEQ ID NO: 3757 - protein, 21 aa, synthetic construct
  REGION 1..21: note = Synthetic
KNIKEFLQSFVHIVQMFINTS

SEQ ID NO: 3758 - protein, 30 aa, synthetic construct
  REGION 1..30: note = Synthetic
RGIATFMTDLVEGSKYFRVKMDIKLYECYY

SEQ ID NO: 3759 - protein, 29 aa, synthetic construct
  REGION 1..29: note = Synthetic
KVQRILDKFMESLSEKQKKEFGDLYFDKV

SEQ ID NO: 3760 - protein, 26 aa, synthetic construct
  REGION 1..26: note = Synthetic
QQIQAIMDSLSESVRREIINALSPQE

SEQ ID NO: 3761 - protein, 29 aa, synthetic construct
  REGION 1..29: note = Synthetic
ARAAAKTAADALAAAKKTAADAAAAAAAA

SEQ ID NO: 3762 - protein, 24 aa, synthetic construct
  REGION 1..24: note = Synthetic
VLNALGQAWNAVGNSISRYYCDAE

SEQ ID NO: 3763 - protein, 29 aa, synthetic construct
  REGION 1..29: note = Synthetic
SADQAARSAMNRPPGCCNNPACVKHRCGG

SEQ ID NO: 3764 - protein, 31 aa, synthetic construct
  REGION 1..31: note = Synthetic
FYGGCYGNANNFKEINECDRRCVSPDINKPG

SEQ ID NO: 3765 - protein, 18 aa, synthetic construct
  REGION 1..18: note = Synthetic
AKNAIGKCDDFKCQCLNS

SEQ ID NO: 3766 - protein, 33 aa, synthetic construct
  REGION 1..33: note = Synthetic
FSSLKDYWSTVKDKFSEFWDLDPEVRPTSAVAA

SEQ ID NO: 3767 - protein, 42 aa, synthetic construct
  REGION 1..42: note = Synthetic
CLKNAARGIRGLNVGKAASIPSKCGVSIPYTISTSTDCSRVS

SEQ ID NO: 3768 - protein, 12 aa, synthetic construct
  REGION 1..12: note = Synthetic
VAFFKAVGATIM

SEQ ID NO: 3769 - protein, 31 aa, synthetic construct
  REGION 1..31: note = Synthetic
TLEDAAKSAADKVKRSLSDDDDREKKHPKEL

SEQ ID NO: 3770 - protein, 28 aa, synthetic construct
  REGION 1..28: note = Synthetic
TNYEGGGEDVFEDGKRRVFTGPNPLHNR

SEQ ID NO: 3771 - protein, 23 aa, synthetic construct
  REGION 1..23: note = Synthetic
GNCGDGWKKCRSVNAIFNCCQRV

SEQ ID NO: 3772 - protein, 30 aa, synthetic construct
  REGION 1..30: note = Synthetic
LSSVYGNGKSILRGILRKGICCGVSFCYPC

SEQ ID NO: 3773 - protein, 21 aa, synthetic construct
  REGION 1..21: note = Synthetic
AGWEKCASYYTIIADCCRKKK

SEQ ID NO: 3774 - protein, 42 aa, synthetic construct
  REGION 1..42: note = Synthetic
KLCSNGGTKCTHHCGKNNTVGICHGQNGNLKCECVEYKRKMF

SEQ ID NO: 3775 - protein, 17 aa, synthetic construct
  REGION 1..17: note = Synthetic
TAAGHLGSVLAAKQSGW

SEQ ID NO: 3776 - protein, 27 aa, synthetic construct
  REGION 1..27: note = Synthetic
GESCCTGICKWVFFTSKFMCRRVWGKD

SEQ ID NO: 3777 - protein, 31 aa, synthetic construct
  REGION 1..31: note = Synthetic
FKKWLQTVAEAAEELKNMVEKVANGDSGKTN

SEQ ID NO: 3778 - protein, 42 aa, synthetic construct
  REGION 1..42: note = Synthetic
CLKSLATSIKGINMGKVSGVPGKCGVSVPFPISMSTDCNKVH

SEQ ID NO: 3779 - protein, 15 aa, synthetic construct
  REGION 1..15: note = Synthetic
TALRRYNQWATGHFM

SEQ ID NO: 3780 - protein, 33 aa, synthetic construct
  REGION 1..33: note = Synthetic
LGKRGLKNLDQYNDLFDGEISDADIKFLKDLMR

SEQ ID NO: 3781 - protein, 29 aa, synthetic construct
  REGION 1..29: note = Synthetic
VEDAIRKFVRWLVQKYGINIHDLIDHFKH

SEQ ID NO: 3782 - protein, 27 aa, synthetic construct
  REGION 1..27: note = Synthetic
ADQAANEWGRSGKDPNHFRPAGLPDKY

SEQ ID NO: 3783 - protein, 29 aa, synthetic construct
  REGION 1..29: note = Synthetic
EVMNKAVEKCTKACSTFCTKGSKIAVKTA

SEQ ID NO: 3784 - protein, 29 aa, synthetic construct
  REGION 1..29: note = Synthetic
ILDKFLKEFSSVFHHSKMSTSTGAWSNLV

SEQ ID NO: 3785 - protein, 24 aa, synthetic construct
  REGION 1..24: note = Synthetic
LKKGVQIARQCFCSEKDVIYKKDI

SEQ ID NO: 3786 - protein, 29 aa, synthetic construct
  REGION 1..29: note = Synthetic
SSLKDYWSTFKGKFTDFWDYTPKPEPSSS

SEQ ID NO: 3787 - protein, 32 aa, synthetic construct
  REGION 1..32: note = Synthetic
RFLKGYWSKFTDKFTGFWDSNPEDQPTPAIES

SEQ ID NO: 3788 - protein, 19 aa, synthetic construct
  REGION 1..19: note = Synthetic
VINNLAKGLDEIVSKVLGQ

SEQ ID NO: 3789 - protein, 41 aa, synthetic construct
  REGION 1..41: note = Synthetic
YKNVIERFIKNCFGLEKETNYRTWFNLSCGDDYPFVCKSPA

SEQ ID NO: 3790 - protein, 41 aa, synthetic construct; identical to SEQ ID NO: 3789
  REGION 1..41: note = Synthetic

SEQ ID NO: 3791 - protein, 31 aa, synthetic construct
  REGION 1..31: note = Synthetic
TLEDAAKSAAETVRTFSESDENRETQHQNEL

SEQ ID NO: 3792 - protein, 29 aa, synthetic construct
  REGION 1..29: note = Synthetic
KMIQTGAENLAEEAETLAAALLEEEMMDN

SEQ ID NO: 3793 - protein, 22 aa, synthetic construct
  REGION 1..22: note = Synthetic
DNVAAAWNKALDNTYAIVVPRL

SEQ ID NO: 3794 - protein, 33 aa, synthetic construct
  REGION 1..33: note = Synthetic
TAFNNIVKTFTDALTKMMPPPSSGAPSNGAPAQ

SEQ ID NO: 3795 - protein, 28 aa, synthetic construct
  REGION 1..28: note = Synthetic
NDVNHAWDDAFDKMYFVVFSALEGHPVS

SEQ ID NO: 3796 - protein, 24 aa, synthetic construct
  REGION 1..24: note = Synthetic
AVEKCANACSTVCTKGSVNAVEIA

SEQ ID NO: 3797 - protein, 24 aa, synthetic construct
  REGION 1..24: note = Synthetic
AVEKCANACSTVCTKGSVNAVEIA

SEQ ID NO: 3798 - protein, 28 aa, synthetic construct
  REGION 1..28: note = Synthetic
LLKNLLNQVTTLVNEAALNESSNVKQTQ

SEQ ID NO: 3799 - protein, 17 aa, synthetic construct
  REGION 1..17: note = Synthetic
FCQACWNSARTCGPYVG

SEQ ID NO: 3800 - protein, 22 aa, synthetic construct
  REGION 1..22: note = Synthetic
DNVAAAWNKALDNTYAIVVPRL

SEQ ID NO: 3801 - protein, 18 aa, synthetic construct
  REGION 1..18: note = Synthetic
LDRVCEECYQLFRESDVH

SEQ ID NO: 3802 - protein, 27 aa, synthetic construct
  REGION 1..27: note = Synthetic
GGGGKKCGGYGGGYGSGVIIGAERPKK

SEQ ID NO: 3803 - protein, 12 aa, synthetic construct
  REGION 1..12: note = Synthetic
GISALMNEAGRR

SEQ ID NO: 3804 - protein, 12 aa, synthetic construct
  REGION 1..12: note = Synthetic
EAYEKYIKSIEE

SEQ ID NO: 3805 - protein, 15 aa, synthetic construct
  REGION 1..15: note = Synthetic
VLYQLWEWFSSFLHQ

SEQ ID NO: 3806 - protein, 41 aa, synthetic construct
  REGION 1..41: note = Synthetic
QCLNNLLSTWDPSVRLSPVSCNCTPQPNNNILCSCPNMICP

SEQ ID NO: 3807 - protein, 42 aa, synthetic construct
  REGION 1..42: note = Synthetic
CLKSLATSIKSINMGKVSGVPGKCGVSVPFPISMSTNCNNVN

SEQ ID NO: 3808 - protein, 12 aa, synthetic construct
  REGION 1..12: note = Synthetic
FQEAYRRFYGPV

SEQ ID NO: 3809 - protein, 24 aa, synthetic construct
  REGION 1..24: note = Synthetic
LLDIVTGLLGNLIVDVLKPKTPAS

SEQ ID NO: 3810 - protein, 24 aa, synthetic construct
  REGION 1..24: note = Synthetic
LLDIVTGLLGNLIVDVLKPKTPAS

SEQ ID NO: 3811 - protein, 36 aa, synthetic construct
  REGION 1..36: note = Synthetic
TCVDSMADPVRVKRVWPLVIRTVIAGYNLYRAIKKK

SEQ ID NO: 3812 - protein, 24 aa, synthetic construct
  REGION 1..24: note = Synthetic
LKKGVQIARQCFCSEKDVIYKKDI

SEQ ID NO: 3813 - protein, 24 aa, synthetic construct
  REGION 1..24: note = Synthetic
LKKGVQIARQCFCSEKDVIYKKDI

SEQ ID NO: 3814 - protein, 41 aa, synthetic construct
  REGION 1..41: note = Synthetic
DIIDNVENAIHKAAKTGIGMVKPIENIFIPNQQKKSTEASN

SEQ ID NO: 3815 - protein, 12 aa, synthetic construct
  REGION 1..12: note = Synthetic
FYGSYSGLGSSL

SEQ ID NO: 3816 - protein, 12 aa, synthetic construct
  REGION 1..12: note = Synthetic
FYGSYSGLGSSL

SEQ ID NO: 3817 - protein, 29 aa, synthetic construct
  REGION 1..29: note = Synthetic
TTAFSSVTHICRDVNYGWIIRYMHANGAS

SEQ ID NO: 3818 - protein, 29 aa, synthetic construct
  REGION 1..29: note = Synthetic
TTAFSSVTHICRDVNYGWIIRYMHANGAS

SEQ ID NO: 3819 - protein, 29 aa, synthetic construct
  REGION 1..29: note = Synthetic
TTAFSSVTHICRDVNYGWIIRYLHANGAS

SEQ ID NO: 3820 - protein, 35 aa, synthetic construct
  REGION 1..35: note = Synthetic
IISSFKSFISTISKVSNSIILGLMTLIVFVYLILI

SEQ ID NO: 3821 - protein, 18 aa, synthetic construct
  REGION 1..18: note = Synthetic
LKKFLQFIYYCCNICLSE

SEQ ID NO: 3822 - protein, 18 aa, synthetic construct
  REGION 1..18: note = Synthetic
VSTLLTVMSTAFSGLGVL

SEQ ID NO: 3823 - protein, 12 aa, synthetic construct
  REGION 1..12: note = Synthetic
VLNSLDNLVSGL

SEQ ID NO: 3824 - protein, 35 aa, synthetic construct
  REGION 1..35: note = Synthetic
WSQAMKPLEDAADYMRSQGVSESAIKHFIAAYFNH

SEQ ID NO: 3825 - protein, 42 aa, synthetic construct
  REGION 1..42: note = Synthetic
FDEFHEAFHNFLHTHSVWNDNVDAAWHCNEKEIRKVINANLE

SEQ ID NO: 3826 - protein, 25 aa, synthetic construct
  REGION 1..25: note = Synthetic
QEANRWGRSGKDPNRYRPKGLDPKY

SEQ ID NO: 3827 - protein, 27 aa, synthetic construct
  REGION 1..27: note = Synthetic
KECWAPCKAAVGTDRGKCMGKKCRCYG

SEQ ID NO: 3828 - protein, 37 aa, synthetic construct
  REGION 1..37: note = Synthetic
RDCRALYGGCTKDEDCCKHLACRRTLPTYCAWDLTFP

SEQ ID NO: 3829 - protein, 37 aa, synthetic construct; identical to SEQ ID NO: 3828
  REGION 1..37: note = Synthetic

SEQ ID NO: 3830 - protein, 33 aa, synthetic construct
  REGION 1..33: note = Synthetic
CGSDGRTYANSCIARCNGVSIKSEGSCPTGILN

SEQ ID NO: 3831 - protein, 12 aa, synthetic construct
  REGION 1..12: note = Synthetic
FFGSYSGLGSSL

SEQ ID NO: 3832 - protein, 27 aa, synthetic construct
  REGION 1..27: note = Synthetic
EELGKIIEGFVTGAEDIISGASRITKS

SEQ ID NO: 3833 - protein, 14 aa, synthetic construct
  REGION 1..14: note = Synthetic
FEELGSKIAQLFTG

SEQ ID NO: 3834 - protein, 12 aa, synthetic construct
  REGION 1..12: note = Synthetic
EKIQAIVGQYVN

SEQ ID NO: 3835 - protein, 31 aa, synthetic construct
  REGION 1..31: note = Synthetic
REMSQIMQSARRLLNMCRVGPTECDFEMSTY

SEQ ID NO: 3836 - protein, 34 aa, synthetic construct
  REGION 1..34: note = Synthetic
LRKLETVVNEIVDEMNYLKRREAKLRDTNGKLIS

SEQ ID NO: 3837 - protein, 29 aa, synthetic construct
  REGION 1..29: note = Synthetic
DQFLSKIPAACNIKVGFPVSTNTNCETIH

SEQ ID NO: 3838 - protein, 29 aa, synthetic construct
  REGION 1..29: note = Synthetic
DQFLSKIPAACNIKVGFPVSTATNCETIH

SEQ ID NO: 3839 - protein, 33 aa, synthetic construct
  REGION 1..33: note = Synthetic
CGTDGKTYANECILCFENRKFGTSIRIQRRGLC

SEQ ID NO: 3840 - protein, 25 aa, synthetic construct
  REGION 1..25: note = Synthetic
LIGRCPSGWHNCRGSGPFIGYCCKQ

SEQ ID NO: 3841 - protein, 42 aa, synthetic construct
  REGION 1..42: note = Synthetic
CLKSAANSIKGIDTGKAAGLPGVCGVNIPYKISPSTDCSTVQ

SEQ ID NO: 3842 - protein, 16 aa, synthetic construct
  REGION 1..16: note = Synthetic
KFPELLQHVLSKAREG

SEQ ID NO: 3843 - protein, 22 aa, synthetic construct
  REGION 1..22: note = Synthetic
TVVEFLSRWITFCQSTIAAMTQ

SEQ ID NO: 3844 - protein, 17 aa, synthetic construct
  REGION 1..17: note = Synthetic
KDVNTLAEALLEADMMV

SEQ ID NO: 3845 - protein, 42 aa, synthetic construct
  REGION 1..42: note = Synthetic
ETLESLGGALEASLYSTEVVALSRLQASLQDMLWRLDLSPGC

SEQ ID NO: 3846 - protein, 25 aa, synthetic construct
  REGION 1..25: note = Synthetic
EKAEEWGRSGKDPDRFRPDGLPKKY

SEQ ID NO: 3847 - protein, 41 aa, synthetic construct
  REGION 1..41: note = Synthetic
KMFGDCWGDGDCCLHLGCKTRKLPPWTDKPYCAWDWTFGRK

SEQ ID NO: 3848 - protein, 24 aa, synthetic construct
  REGION 1..24: note = Synthetic
NMAAKCNACCGSRRGSCRGPQCIC

SEQ ID NO: 3849 - protein, 37 aa, synthetic construct
  REGION 1..37: note = Synthetic
ALERASEVLNNCLNSELHSRMIDYHIGLLKTMGSTTE

SEQ ID NO: 3850 - protein, 23 aa, synthetic construct
  REGION 1..23: note = Synthetic
LSFLKSLLGTFQKTEMQRQKSRP

SEQ ID NO: 3851 - protein, 19 aa, synthetic construct
  REGION 1..19: note = Synthetic
IDHLFENMKKALVLLKTEL

SEQ ID NO: 3852 - protein, 19 aa, synthetic construct
  REGION 1..19: note = Synthetic
IDHLFENMKKALVLLKTEL

SEQ ID NO: 3853 - protein, 17 aa, synthetic construct
  REGION 1..17: note = Synthetic
GYNAAYNRYFRQRRRAE

SEQ ID NO: 3854 - protein, 35 aa, synthetic construct
  REGION 1..35: note = Synthetic
SILDQILQNIGRSSGNIFHKEQQRTSAQRRSQGSQ

SEQ ID NO: 3855 - protein, 12 aa, synthetic construct
  REGION 1..12: note = Synthetic
FYGAYSGLGSSL

SEQ ID NO: 3856 - protein, 42 aa, synthetic construct
  REGION 1..42: note = Synthetic
ENYQKLIGRGAEDSKADQEANQWGRSGNDPNHFRPKGLPDKY

SEQ ID NO: 3857 - protein, 27 aa, synthetic construct
  REGION 1..27: note = Synthetic
HQMARKCDDCCGGKGRGKCYGPQCLCR

SEQ ID NO: 3858 - protein, 21 aa, synthetic construct
  REGION 1..21: note = Synthetic
IAKVENYLESLHLNRDKLKVC

SEQ ID NO: 3859 - protein, 42 aa, synthetic construct
  REGION 1..42: note = Synthetic
CLKSAANAIKGINYGKAAGLPGMCGVHIPYAISPSTNCNAVH

SEQ ID NO: 3860 - protein, 20 aa, synthetic construct
  REGION 1..20: note = Synthetic
SSLKSFVEKAAKELTTETTE

SEQ ID NO: 3861 - protein, 18 aa, synthetic construct
  REGION 1..18: note = Synthetic
CSRCCSYAGEAVQTQSGH

SEQ ID NO: 3862 - protein, 11 aa, synthetic construct
  REGION 1..11: note = Synthetic
LAALEKALKEY

SEQ ID NO: 3863 - protein, 15 aa, synthetic construct
  REGION 1..15: note = Synthetic
HVKQAINKMLTKISS

SEQ ID NO: 3864 - protein, 18 aa, synthetic construct
  REGION 1..18: note = Synthetic
GCLAGYMRTADGRCKPTF

SEQ ID NO: 3865 - protein, 26 aa, synthetic construct
  REGION 1..26: note = Synthetic
GALGIANSFLDEYLDLNIAKKLRRQF

SEQ ID NO: 3866 - protein, 13 aa, synthetic construct
  REGION 1..13: note = Synthetic
QYSRLGDKWARNK

SEQ ID NO: 3867 - protein, 18 aa, synthetic construct
  REGION 1..18: note = Synthetic
CSRCCSYAGEAVQTQSGH

SEQ ID NO: 3868 - protein, 24 aa, synthetic construct
  REGION 1..24: note = Synthetic
AVERCEDACDRFCTNEAQTVTVVS

SEQ ID NO: 3869 - protein, 34 aa, synthetic construct
  REGION 1..34: note = Synthetic
LKELVKKASDIIKKEESLEKKLTEHLSPGSSANG

SEQ ID NO: 3870 - protein, 35 aa, synthetic construct
  REGION 1..35: note = Synthetic
KPLHTMVNHISRFATKMTEPQPKYSTTEKQVLDML

SEQ ID NO: 3871 - protein, 26 aa, synthetic construct
  REGION 1..26: note = Synthetic
KRFLSTLLNVASNVVPTLICKITKKC

SEQ ID NO: 3872 - protein, 25 aa, synthetic construct
  REGION 1..25: note = Synthetic
WLAGCPSGWHNCKAHGPTIGWCCKQ

SEQ ID NO: 3873 - protein, 25 aa, synthetic construct
  REGION 1..25: note = Synthetic
WLAGCPSGWHNCKAHGPTIGWCCKQ

SEQ ID NO: 3874 - protein, 25 aa, synthetic construct
  REGION 1..25: note = Synthetic
WLAGCPSGWHNCKAHGPTIGWCCKQ

SEQ ID NO: 3875 - protein, 25 aa, synthetic construct
  REGION 1..25: note = Synthetic
WLAGCPSGWHNCKAHGPTIGWCCKQ

SEQ ID NO: 3876 - protein, 25 aa, synthetic construct
  REGION 1..25: note = Synthetic
WLAGCPSGWHNCKAHGPTIGWCCKK

SEQ ID NO: 3877 - protein, 14 aa, synthetic construct
  REGION 1..14: note = Synthetic
LLGTLGNLLNGLGL

SEQ ID NO: 3878 - protein, 31 aa, synthetic construct
  REGION 1..31: note = Synthetic
FAKCFHDLIKKFKKLGYVDGDNMVGASYDWR

SEQ ID NO: 3879 - protein, 35 aa, synthetic construct
  REGION 1..35: note = Synthetic
QIDTLYGAIIAGHLNPLESRPSSAIAPTSLLTPMP

SEQ ID NO: 3880 - protein, 19 aa, synthetic construct
  REGION 1..19: note = Synthetic
ELARQAMKQIQDVIDAAIE

SEQ ID NO: 3881 - protein, 19 aa, synthetic construct
  REGION 1..19: note = Synthetic
AEQMMEKIKNLWYTKVLGY

SEQ ID NO: 3882 - protein, 25 aa, synthetic construct
  REGION 1..25: note = Synthetic
WLAGCPSGWHNCKAHGPTIGWCCKK

SEQ ID NO: 3883 - protein, 17 aa, synthetic construct
  REGION 1..17: note = Synthetic
LPRLLRTYISRIYINKL

SEQ ID NO: 3884 - protein, 17 aa, synthetic construct
  REGION 1..17: note = Synthetic
LPRLLRTYISRIYINKL

SEQ ID NO: 3885 - protein, 30 aa, synthetic construct
  REGION 1..30: note = Synthetic
LRYIRGCAATCPETKPRDMVECCSTDRCNR

SEQ ID NO: 3886 - protein, 21 aa, synthetic construct
  REGION 1..21: note = Synthetic
GIVDQCCTSICSLYQLENYCN

SEQ ID NO: 3887 - protein, 21 aa, synthetic construct
  REGION 1..21: note = Synthetic
GIVDQCCTSICSLYQLENYCN

SEQ ID NO: 3888 - protein, 11 aa, synthetic construct
  REGION 1..11: note = Synthetic
SALGGLLKKIG

SEQ ID NO: 3889 - protein, 17 aa, synthetic construct
  REGION 1..17: note = Synthetic
VAKHVLASYNTAEATTN

SEQ ID NO: 3890 - protein, 20 aa, synthetic construct
  REGION 1..20: note = Synthetic
LRDLKGALESLIEEETGQKT

SEQ ID NO: 3891 - protein, 17 aa, synthetic construct
  REGION 1..17: note = Synthetic
VAQILQDFAEDIDKMKH

SEQ ID NO: 3892 - protein, 30 aa, synthetic construct
  REGION 1..30: note = Synthetic
VYTVVASFVSLFIFGFLSNDPGRRPGRKRI

SEQ ID NO: 3893 - protein, 16 aa, synthetic construct
  REGION 1..16: note = Synthetic
SNCQHFAEELYQFVQA

SEQ ID NO: 3894 - protein, 22 aa, synthetic construct
  REGION 1..22: note = Synthetic
DNVAAAWNKALDNTFAIVVPRL

SEQ ID NO: 3895 - protein, 22 aa, synthetic construct
  REGION 1..22: note = Synthetic
DNVAAAWNKALDNTFAIVVPRL

SEQ ID NO: 3896 - protein, 36 aa, synthetic construct
  REGION 1..36: note = Synthetic
ECDKAAATCFARNKTTYNKKYQYYSNKHCRGSTPRC

SEQ ID NO: 3897 - protein, 14 aa, synthetic construct
  REGION 1..14: note = Synthetic
FVYDVETVMSKLVK

SEQ ID NO: 3898 - protein, 23 aa, synthetic construct
  REGION 1..23: note = Synthetic
SRILNYMEDVLHYIGISPIYRGS

SEQ ID NO: 3899 - protein, 20 aa, synthetic construct
  REGION 1..20: note = Synthetic
VLNNLAKGLDDILNKVLGQQ

SEQ ID NO: 3900 - protein, 16 aa, synthetic construct
  REGION 1..16: note = Synthetic
KFIKPMEYVLNSVEDH

SEQ ID NO: 3901 - protein, 21 aa, synthetic construct
  REGION 1..21: note = Synthetic
LRDLRGALERLIEEEAGQKKM

SEQ ID NO: 3902 - protein, 24 aa, synthetic construct
  REGION 1..24: note = Synthetic
QAYQRYFGSGTHPQQRPAAAARRY

SEQ ID NO: 3903 - protein, 25 aa, synthetic construct
  REGION 1..25: note = Synthetic
AATIVEFLNKWIIFCQSIISKRLDN

SEQ ID NO: 3904 - protein, 21 aa, synthetic construct
  REGION 1..21: note = Synthetic
FARQFFQQWYYVMEQLVAHNH

SEQ ID NO: 3905 - protein, 21 aa, synthetic construct
  REGION 1..21: note = Synthetic
FARQFFQQWYYVMEQLVAHNH

SEQ ID NO: 3906 - protein, 42 aa, synthetic construct
  REGION 1..42: note = Synthetic
EPMREYMHHLLALEHRAEEQFLEHWLNPHCKPHCDRNIVHPV

SEQ ID NO: 3907 - protein, 22 aa, synthetic construct
  REGION 1..22: note = Synthetic
DNVAAAWNKALDNTFAIVVPRL

SEQ ID NO: 3908 - protein, 16 aa, synthetic construct
  REGION 1..16: note = Synthetic
KVGKQLASHLAKKQLE

SEQ ID NO: 3909 - protein, 32 aa, synthetic construct
  REGION 1..32: note = Synthetic
EALEKFDKALKALPMHIRLSFNPTQLEEQCHV

SEQ ID NO: 3910 - protein, 32 aa, synthetic construct
  REGION 1..32: note = Synthetic
EALEKFDKALKALPMHIRLSFNPTQLEEQCHI

SEQ ID NO: 3911 - protein, 42 aa, synthetic construct
  REGION 1..42: note = Synthetic
EPMREYMHHLLALEHRAEEQFLEHWLNPHCKPHCDRNIVQPV

SEQ ID NO: 3912 - protein, 18 aa, synthetic construct
  REGION 1..18: note = Synthetic
CSRCCSYAGEAVQTQPGH

SEQ ID NO: 3913 - protein, 12 aa, synthetic construct
  REGION 1..12: note = Synthetic
FYGSYSGLGSSL

SEQ ID NO: 3914 - protein, 12 aa, synthetic construct
  REGION 1..12: note = Synthetic
FYGSYSGLGSSL

SEQ ID NO: 3915 - protein, 12 aa, synthetic construct
  REGION 1..12: note = Synthetic
FYGSYSGLGSSL

SEQ ID NO: 3916 - protein, 12 aa, synthetic construct
  REGION 1..12: note = Synthetic
FYGSYSGLGSSL

SEQ ID NO: 3917 - protein, 12 aa, synthetic construct
  REGION 1..12: note = Synthetic
FYGSYSGLGSSL

SEQ ID NO: 3918 - protein, 12 aa, synthetic construct
  REGION 1..12: note = Synthetic
FYGSYSGLGSSL

SEQ ID NO: 3919 - protein, 12 aa, synthetic construct
  REGION 1..12: note = Synthetic
FYGSYSGLGSSL

SEQ ID NO: 3920 - protein, 12 aa, synthetic construct
  REGION 1..12: note = Synthetic
FYGSYSGLGSSL

SEQ ID NO: 3921 - protein, 12 aa, synthetic construct
  REGION 1..12: note = Synthetic
FYGSYSGLGSSL

SEQ ID NO: 3922 - protein, 12 aa, synthetic construct
  REGION 1..12: note = Synthetic
FYGSYSGLGSSL

SEQ ID NO: 3923 - protein, 12 aa, synthetic construct
  REGION 1..12: note = Synthetic
FYGSYSGLGSSL

SEQ ID NO: 3924 - protein, 12 aa, synthetic construct
  REGION 1..12: note = Synthetic
FYGSYSGLGSSL

SEQ ID NO: 3925 - protein, 12 aa, synthetic construct
  REGION 1..12: note = Synthetic
FYGSYSGLGSSL

SEQ ID NO: 3926 - protein, 12 aa, synthetic construct
  REGION 1..12: note = Synthetic
FYGSYSGLGSSL

SEQ ID NO: 3927 - protein, 12 aa, synthetic construct
  REGION 1..12: note = Synthetic
FYGSYSGLGSSL

SEQ ID NO: 3928 - protein, 12 aa, synthetic construct
  REGION 1..12: note = Synthetic
FYGSYSGLGSSL

SEQ ID NO: 3929 - protein, 12 aa, synthetic construct
  REGION 1..12: note = Synthetic
FYGSYSGLGSSL

SEQ ID NO: 3930 - protein, 12 aa, synthetic construct
  REGION 1..12: note = Synthetic
FYGSYSGLGSSL

SEQ ID NO: 3931 - protein, 12 aa, synthetic construct
  REGION 1..12: note = Synthetic
FYGSYSGLGSSL

SEQ ID NO: 3932 - protein, 12 aa, synthetic construct
  REGION 1..12: note = Synthetic
FYGSYSGLGSSL

SEQ ID NO: 3933 - protein, 12 aa, synthetic construct
  REGION 1..12: note = Synthetic
FYGSYSGLGSSL

SEQ ID NO: 3934 - protein, 12 aa, synthetic construct
  REGION 1..12: note = Synthetic
FYGSYSGLGSSL

SEQ ID NO: 3935 - protein, 12 aa, synthetic construct
  REGION 1..12: note = Synthetic
FYGSYSGLGSSL

SEQ ID NO: 3936 - protein, 12 aa, synthetic construct
  REGION 1..12: note = Synthetic
FYGSYSGLGSSL

SEQ ID NO: 3937 - protein, 12 aa, synthetic construct
  REGION 1..12: note = Synthetic
FYGSYSGLGSSL

SEQ ID NO: 3938 - protein, 12 aa, synthetic construct
  REGION 1..12: note = Synthetic
FYGSYSGLGSSL

SEQ ID NO: 3939 - protein, 12 aa, synthetic construct
  REGION 1..12: note = Synthetic
FYGSYSGLGSSL

SEQ ID NO: 3940 - protein, 12 aa, synthetic construct
  REGION 1..12: note = Synthetic
FYGSYSGLGSSL

SEQ ID NO: 3941 - protein, 12 aa, synthetic construct
  REGION 1..12: note = Synthetic
FYGSYSGLGSSL

SEQ ID NO: 3942 - protein, 12 aa, synthetic construct
  REGION 1..12: note = Synthetic
FYGSYSGLGSSL

SEQ ID NO: 3943 - protein, 12 aa, synthetic construct
  REGION 1..12: note = Synthetic
FYGSYSGLGSSL

SEQ ID NO: 3944 - protein, 12 aa, synthetic construct
  REGION 1..12: note = Synthetic
FYGSYSGLGSSL

SEQ ID NO: 3945 - protein, 12 aa, synthetic construct
  REGION 1..12: note = Synthetic
FYGSYSGLGSSL

SEQ ID NO: 3946 - protein, 12 aa, synthetic construct
  REGION 1..12: note = Synthetic
FYGSYSGLGSSL

SEQ ID NO: 3947 - protein, 12 aa, synthetic construct
  REGION 1..12: note = Synthetic
FYGSYSGLGSSL

SEQ ID NO: 3948 - protein, 12 aa, synthetic construct
  REGION 1..12: note = Synthetic
FYGSYSGLGSSL

SEQ ID NO: 3949 - protein, 12 aa, synthetic construct
  REGION 1..12: note = Synthetic
FYGSYSGLGSSL

SEQ ID NO: 3950 - protein, 12 aa, synthetic construct
  REGION 1..12: note = Synthetic
FYGSYSGLGSSL

SEQ ID NO: 3951 - protein, 12 aa, synthetic construct
  REGION 1..12: note = Synthetic
FYGSYSGLGSSL

SEQ ID NO: 3952 - protein, 12 aa, synthetic construct
  REGION 1..12: note = Synthetic
FYGSYSGLGSSL

SEQ ID NO: 3953 - protein, 12 aa, synthetic construct
  REGION 1..12: note = Synthetic
FYGSYSGLGSSL

SEQ ID NO: 3954 - protein, 12 aa, synthetic construct
  REGION 1..12: note = Synthetic
FYGSYSGLGSSL

SEQ ID NO: 3955 - protein, 12 aa, synthetic construct
  REGION 1..12: note = Synthetic
FYGSYSGLGSSL

SEQ ID NO: 3956 - protein, 12 aa, synthetic construct
  REGION 1..12: note = Synthetic
FYGSYSGLGSSL

SEQ ID NO: 3957 - protein, 12 aa, synthetic construct
  REGION 1..12: note = Synthetic
FYGSYSGLGSSL

SEQ ID NO: 3958 - protein, 12 aa, synthetic construct
  REGION 1..12: note = Synthetic
FYGSYSGLGSSL

SEQ ID NO: 3959 - protein, 12 aa, synthetic construct
  REGION 1..12: note = Synthetic
FYGSYSGLGSSL

SEQ ID NO: 3960 - protein, 12 aa, synthetic construct
  REGION 1..12: note = Synthetic
FYGSYSGLGSSL

SEQ ID NO: 3961 - protein, 12 aa, synthetic construct
  REGION 1..12: note = Synthetic
FYGSYSGLGSSL

SEQ ID NO: 3962 - protein, 12 aa, synthetic construct
  REGION 1..12: note = Synthetic
FYGSYSGLGSSL

SEQ ID NO: 3963 - protein, 12 aa, synthetic construct
  REGION 1..12: note = Synthetic
FYGSYSGLGSSL

SEQ ID NO: 3964 - protein, 12 aa, synthetic construct
  REGION 1..12: note = Synthetic
FYGSYSGLGSSL

SEQ ID NO: 3965 - protein, 12 aa, synthetic construct
  REGION 1..12: note = Synthetic
FYGSYSGLGSSL

SEQ ID NO: 3966 - protein, 12 aa, synthetic construct
  REGION 1..12: note = Synthetic
FYGSYSGLGSSL

SEQ ID NO: 3967 - protein, 12 aa, synthetic construct
  REGION 1..12: note = Synthetic
FYGSYSGLGSSL

SEQ ID NO: 3968 - protein, 12 aa, synthetic construct
  REGION 1..12: note = Synthetic
FYGSYSGLGSSL

SEQ ID NO: 3969 - protein, 12 aa, synthetic construct
  REGION 1..12: note = Synthetic
FYGSYSGLGSSL

SEQ ID NO: 3970 - protein, 12 aa, synthetic construct
  REGION 1..12: note = Synthetic
FYGSYSGLGSSL

SEQ ID NO: 3971 - protein, 12 aa, synthetic construct
  REGION 1..12: note = Synthetic
FYGSYSGLGSSL

SEQ ID NO: 3972 - protein, 12 aa, synthetic construct
  REGION 1..12: note = Synthetic
FYGSYSGLGSSL

SEQ ID NO: 3973 - protein, 12 aa, synthetic construct
  REGION 1..12: note = Synthetic
FYGSYSGLGSSL

SEQ ID NO: 3974 - protein, 12 aa, synthetic construct
  REGION 1..12: note = Synthetic
FYGSYSGLGSSL

SEQ ID NO: 3975 - protein, 12 aa, synthetic construct
  REGION 1..12: note = Synthetic
FYGSYSGLGSSL

SEQ ID NO: 3976 - protein, 12 aa, synthetic construct
  REGION 1..12: note = Synthetic
FYGSYSGLGSSL

SEQ ID NO: 3977 - protein, 12 aa, synthetic construct
  REGION 1..12: note = Synthetic
FYGSYSGLGSSL

SEQ ID NO: 3978 - protein, 12 aa, synthetic construct
  REGION 1..12: note = Synthetic
FYGSYSGLGSSL

SEQ ID NO: 3979 - protein, 12 aa, synthetic construct
  REGION 1..12: note = Synthetic
FYGSYSGLGSSL

SEQ ID NO: 3980 - protein, 12 aa, synthetic construct
  REGION 1..12: note = Synthetic
FYGSYSGLGSSL

SEQ ID NO: 3981 - protein, 12 aa, synthetic construct
  REGION 1..12: note = Synthetic
FYGSYSGLGSSL

SEQ ID NO: 3982 - protein, 12 aa, synthetic construct
  REGION 1..12: note = Synthetic
FYGSYSGLGSSL

SEQ ID NO: 3983 - protein, 12 aa, synthetic construct
  REGION 1..12: note = Synthetic
FYGSYSGLGSSL

SEQ ID NO: 3984 - protein, 12 aa, synthetic construct
  REGION 1..12: note = Synthetic
FYGSYSGLGSSL

SEQ ID NO: 3985 - protein, 12 aa, synthetic construct
  REGION 1..12: note = Synthetic
FYGSYSGLGSSL

SEQ ID NO: 3986 - protein, 12 aa, synthetic construct
  REGION 1..12: note = Synthetic
FYGSYSGLGSSL

SEQ ID NO: 3987 - protein, 12 aa, synthetic construct
  REGION 1..12: note = Synthetic
FYGSYSGLGSSL

SEQ ID NO: 3988 - protein, 12 aa, synthetic construct
  REGION 1..12: note = Synthetic
FYGSYSGLGSSL

SEQ ID NO: 3989 - protein, 12 aa, synthetic construct
  REGION 1..12: note = Synthetic
FYGSYSGLGSSL

SEQ ID NO: 3990 - protein, 12 aa, synthetic construct
  REGION 1..12: note = Synthetic
FYGSYSGLGSSL

SEQ ID NO: 3991 - protein, 12 aa, synthetic construct
  REGION 1..12: note = Synthetic
FYGSYSGLGSSL

SEQ ID NO: 3992 - protein, 12 aa, synthetic construct
  REGION 1..12: note = Synthetic
FYGSYSGLGSSL

SEQ ID NO: 3993 - protein, 12 aa, synthetic construct
  REGION 1..12: note = Synthetic
FYGSYSGLGSSL

SEQ ID NO: 3994 - protein, 24 aa, synthetic construct
  REGION 1..24: note = Synthetic
KYLTSLGSNFGGIFVYPLFLLSTF

SEQ ID NO: 3995 - protein, 38 aa, synthetic construct
  REGION 1..38: note = Synthetic
RGCGGLMAGCDGKSTFCCSGYNCSPTWKWCVYARPGRR

SEQ ID NO: 3996 - protein, 38 aa, synthetic construct; identical to SEQ ID NO: 3995
  REGION 1..38: note = Synthetic

SEQ ID NO: 3997 - protein, 23 aa, synthetic construct
  REGION 1..23: note = Synthetic
SLQNCVETCVHGLRRNQDLYVNE

SEQ ID NO: 3998 - protein, 12 aa, synthetic construct
  REGION 1..12: note = Synthetic
FQEAYRRFYGPV

SEQ ID NO: 3999 - protein, 12 aa, synthetic construct
  REGION 1..12: note = Synthetic
FQEAYRRFYGPV

SEQ ID NO: 4000 - protein, 18 aa, synthetic construct
  REGION 1..18: note = Synthetic
QAMSGCTELVKQLLQSDE

SEQ ID NO: 4001 - protein, 12 aa, synthetic construct
  REGION 1..12: note = Synthetic
FYGSYSGLGSSL

SEQ ID NO: 4002 - protein, 17 aa, synthetic construct
  REGION 1..17: note = Synthetic
LIDVLDEYISGVQTVGK

SEQ ID NO: 4003 - protein, 17 aa, synthetic construct
  REGION 1..17: note = Synthetic
LIDVLDEYISGVQTVGK

SEQ ID NO: 4004 - protein, 26 aa, synthetic construct
  REGION 1..26: note = Synthetic
SNFKDLVDSLLQVLNMKEGTPQLNQQ

SEQ ID NO: 4005 - protein, 30 aa, synthetic construct
  REGION 1..30: note = Synthetic
LTDVVRGCAKTCPTPIEEEEVYCCLKDNCN

SEQ ID NO: 4006 - protein, 39 aa, synthetic construct
  REGION 1..39: note = Synthetic
DWVNDGLSSLKDYWGKLKGKFSSFWDSTFEDTTPSPAVA

SEQ ID NO: 4007 - protein, 32 aa, synthetic construct
  REGION 1..32: note = Synthetic
RGMWGKCKDGLTTCLAPSECCSGNCEQNCKMW

SEQ ID NO: 4008 - protein, 32 aa, synthetic construct; identical to SEQ ID NO: 4007
  REGION 1..32: note = Synthetic

SEQ ID NO: 4009 - protein, 31 aa, synthetic construct
  REGION 1..31: note = Synthetic
DDLVDALTKLARGLKAQTSPEQLCGLLKICK

SEQ ID NO: 4010 - protein, 14 aa, synthetic construct
  REGION 1..14: note = Synthetic
FEELGSKIAQLFTG

SEQ ID NO: 4011 - protein, 14 aa, synthetic construct
  REGION 1..14: note = Synthetic
FEELGSKIAQLFTG

SEQ ID NO: 4012 - protein, 14 aa, synthetic construct
  REGION 1..14: note = Synthetic
FEELGSKIAQLFTG

SEQ ID NO: 4013 - protein, 41 aa, synthetic construct
  REGION 1..41: note = Synthetic
DYYGDLAAHLGYFPSSIVREDLTLKPGKVDMKTDEWDFYCQ

SEQ ID NO: 4014 - protein, 41 aa, synthetic construct
  REGION 1..41: note = Synthetic
ARGSDVGDDIKEKFKKLVLEQNFPEAHIKYFNAEQCTPTAA

SEQ ID NO: 4015 - protein, 18 aa, synthetic construct
  REGION 1..18: note = Synthetic
GSSAGAKCMNGKCKCYNN

SEQ ID NO: 4016 - protein, 18 aa, synthetic construct
  REGION 1..18: note = Synthetic
NISYVLREIMKHVDDNNK

SEQ ID NO: 4017 - protein, 17 aa, synthetic construct
  REGION 1..17: note = Synthetic
LIDELRSLGQGIQGQQY

SEQ ID NO: 4018 - protein, 17 aa, synthetic construct
  REGION 1..17: note = Synthetic
LIDELRSLGQGIQGQQY

SEQ ID NO: 4019 - protein, 38 aa, synthetic construct
  REGION 1..38: note = Synthetic
HCAKRIVSGARGMNNWVEWRLHCSGRPLFYWLTGCRLR

SEQ ID NO: 4020 - protein, 20 aa, synthetic construct
  REGION 1..20: note = Synthetic
LFKTLLSAVGSALSSSGDQE

SEQ ID NO: 4021 - protein, 28 aa, synthetic construct
  REGION 1..28: note = Synthetic
EAMKEAVERCNNACSEVCTKGSYAVVNA

SEQ ID NO: 4022 - protein, 26 aa, synthetic construct
  REGION 1..26: note = Synthetic
VSWGDNVAAAWNKALDNTMAVAVAHL

SEQ ID NO: 4023 - protein, 26 aa, synthetic construct
  REGION 1..26: note = Synthetic
VSWGDNVAAAWNKALDNTMAVAVAHL

SEQ ID NO: 4024 - protein, 27 aa, synthetic construct
  REGION 1..27: note = Synthetic
KSFSEAIDKLSNVLEPNKKNENKEQQA

SEQ ID NO: 4025 - protein, 25 aa, synthetic construct
  REGION 1..25: note = Synthetic
GLLSSLSSVAKHVLPHVVPVIAEHL

SEQ ID NO: 4026 - protein, 25 aa, synthetic construct
  REGION 1..25: note = Synthetic
GLLSSLSSVAKHVLPHVVPVIAEHL

SEQ ID NO: 4027 - protein, 35 aa, synthetic construct
  REGION 1..35: note = Synthetic
EASSCCSSCFSRASSPATPLLTPLRNSRSPSMVAF

SEQ ID NO: 4028 - protein, 24 aa, synthetic construct
  REGION 1..24: note = Synthetic
IYGGCGGNANNFKTIEECKSTCAA

SEQ ID NO: 4029 - protein, 27 aa, synthetic construct
  REGION 1..27: note = Synthetic
KECWAPCKAAFGVDRGKCMGKKCKCYV

SEQ ID NO: 4030 - protein, 41 aa, synthetic construct; identical to SEQ ID NO: 3789
  REGION 1..41: note = Synthetic

SEQ ID NO: 4031 - protein, 29 aa, synthetic construct
  REGION 1..29: note = Synthetic
EEANDAVESCDQACSSFCNVHVGAATVVA

SEQ ID NO: 4032 - protein, 20 aa, synthetic construct
  REGION 1..20: note = Synthetic
LFKTLLSAVGSALSSSGEQE

SEQ ID NO: 4033 - protein, 20 aa, synthetic construct
  REGION 1..20: note = Synthetic
LFKTLLSAVGSALSSSGEQE

SEQ ID NO: 4034 - protein, 15 aa, synthetic construct
  REGION 1..15: note = Synthetic
CGDAHHFYRGCTCTC

SEQ ID NO: 4035 - protein, 42 aa, synthetic construct
  REGION 1..42: note = Synthetic
AVEEVKSAFSKLQERGVYKAMGEFDIFINYIEAYMTMKMRKN

SEQ ID NO: 4036 - protein, 17 aa, synthetic construct
  REGION 1..17: note = Synthetic
LESVLRKLLDQAKAITQ

SEQ ID NO: 4037 - protein, 14 aa, synthetic construct
  REGION 1..14: note = Synthetic
FEELGSKLAQLFTG

SEQ ID NO: 4038 - protein, 29 aa, synthetic construct
  REGION 1..29: note = Synthetic
EEANDAVESCDQACSSFCSVHVGSATVVA

SEQ ID NO: 4039 - protein, 29 aa, synthetic construct
  REGION 1..29: note = Synthetic
EEANDAVESCDQACSSFCSVHVGSATVVA

SEQ ID NO: 4040 - protein, 20 aa, synthetic construct
  REGION 1..20: note = Synthetic
AVEFLNKWITFCQSIYSTLT

SEQ ID NO: 4041 - protein, 23 aa, synthetic construct
  REGION 1..23: note = Synthetic
HAFEFMQRALQDLKKTVYNLDTR

SEQ ID NO: 4042 - protein, 33 aa, synthetic construct
  REGION 1..33: note = Synthetic
EEVMEKFSRALQPLPGRVQIVQDPSGGQERCGF

SEQ ID NO: 4043 - protein, 23 aa, synthetic construct
  REGION 1..23: note = Synthetic
CNEGWEKCTAVYTPVASCCRKKK

SEQ ID NO: 4044 - protein, 27 aa, synthetic construct
  REGION 1..27: note = Synthetic
VEALSHVLEKLVEILRNDDPDINTFSK

SEQ ID NO: 4045 - protein, 34 aa, synthetic construct
  REGION 1..34: note = Synthetic
GDLERAAASLPAFCNVDIPNGGGGVCYWLARSGY

SEQ ID NO: 4046 - protein, 23 aa, synthetic construct
  REGION 1..23: note = Synthetic
NNLYSCISQWQRCFNNCESNNQY

SEQ ID NO: 4047 - protein, 35 aa, synthetic construct
  REGION 1..35: note = Synthetic
SLGSFIASLFAGAFIALAIGGVLVFISQSDRVTRS

SEQ ID NO: 4048 - protein, 11 aa, synthetic construct
  REGION 1..11: note = Synthetic
VAMIEAVIEKY

SEQ ID NO: 4049 - protein, 18 aa, synthetic construct
  REGION 1..18: note = Synthetic
LRELVSNAADACDKRRFL

SEQ ID NO: 4050 - protein, 13 aa, synthetic construct
  REGION 1..13: note = Synthetic
HAINAVSAIAKHN

SEQ ID NO: 4051 - protein, 20 aa, synthetic construct
  REGION 1..20: note = Synthetic
RCCSGGCSSGKCVNGACDCS

SEQ ID NO: 4052 - protein, 32 aa, synthetic construct
  REGION 1..32: note = Synthetic
FSTMLQEAIESFKEALKQKVDFIDAYKSLGQA

SEQ ID NO: 4053 - protein, 21 aa, synthetic construct
  REGION 1..21: note = Synthetic
GIVDQCCTNICSRNQLLTYCN

SEQ ID NO: 4054 - protein, 16 aa, synthetic construct
  REGION 1..16: note = Synthetic
VLGLVGNALGGLIKNE

SEQ ID NO: 4055 - protein, 23 aa, synthetic construct
  REGION 1..23: note = Synthetic
LADTMMKIFQQLMDRTKALPAPQ

SEQ ID NO: 4056 - protein, 27 aa, synthetic construct
  REGION 1..27: note = Synthetic
DAEQAWNQAFDCIYEVIFSNLDGHPVV

SEQ ID NO: 4057 - protein, 16 aa, synthetic construct
  REGION 1..16: note = Synthetic
VLSLVGNALGGLLKNE

SEQ ID NO: 4058 - protein, 13 aa, synthetic construct
  REGION 1..13: note = Synthetic
KRLTKMGGDLNSP

SEQ ID NO: 4059 - protein, 26 aa, synthetic construct
  REGION 1..26: note = Synthetic
LNAYFEAYQAIFPFLLEAFLRKEQKV

SEQ ID NO: 4060 - protein, 42 aa, synthetic construct
  REGION 1..42: note = Synthetic
NGCADTCESYARMHNGGPNGCKSSHHHATDNYWRLVQAKGCS

SEQ ID NO: 4061 - protein, 12 aa, synthetic construct
  REGION 1..12: note = Synthetic
GIPKVMNDAGRR

SEQ ID NO: 4062 - protein, 25 aa, synthetic construct
  REGION 1..25: note = Synthetic
LIGRCPSGWHNCRGSGPFIGYCCKQ

SEQ ID NO: 4063 - protein, 28 aa, synthetic construct
  REGION 1..28: note = Synthetic
ASSIFKTLRTIANDDCELCVNVACTGCL

SEQ ID NO: 4064 - protein, 28 aa, synthetic construct
  REGION 1..28: note = Synthetic
CYTGYNGVGKCIASKASRTPNCVCTYNC

SEQ ID NO: 4065 - protein, 33 aa, synthetic construct
  REGION 1..33: note = Synthetic
FSSLKDYWSTVKDKLSGFWDLNPEAKPTLAEAA

SEQ ID NO: 4066 - protein, 32 aa, synthetic construct
  REGION 1..32: note = Synthetic
VRQMYRVASNIPSMCNLQPMSCLFRQQQSSWL

SEQ ID NO: 4067 - protein, 33 aa, synthetic construct
  REGION 1..33: note = Synthetic
IYGGCGGNANNFHTLEECEKVCGVRSRDSPKEN

SEQ ID NO: 4068 - protein, 11 aa, synthetic construct
  REGION 1..11: note = Synthetic
VAMIEAVIEKY

SEQ ID NO: 4069 - protein, 24 aa, synthetic construct
  REGION 1..24: note = Synthetic
IYGGCYGNANNFKTIDECKRTCAA

SEQ ID NO: 4070 - protein, 18 aa, synthetic construct
  REGION 1..18: note = Synthetic
AAWGATLDTFFGMIFSKM

SEQ ID NO: 4071 - protein, 12 aa, synthetic construct
  REGION 1..12: note = Synthetic
VLNSLDNLVSGL

SEQ ID NO: 4072 - protein, 12 aa, synthetic construct
  REGION 1..12: note = Synthetic
VLNSLDNLVSGL

SEQ ID NO: 4073 - protein, 32 aa, synthetic construct
  REGION 1..32: note = Synthetic
NVNEIFYDLVRQINRKTPVPGKARKKSTCHLL

SEQ ID NO: 4074 - protein, 40 aa, synthetic construct
  REGION 1..40: note = Synthetic
LSSIGQCGEDWVVKGCAKTCPTAGPGERVKCCYSPRCNKN

SEQ ID NO: 4075 - protein, 34 aa, synthetic construct
  REGION 1..34: note = Synthetic
DDLNKWAYKAYKCATSGRFGHWVNEYMKQEMETK

SEQ ID NO: 4076 - protein, 18 aa, synthetic construct
  REGION 1..18: note = Synthetic
GAGKGVLTTLSCKLDKSC

SEQ ID NO: 4077 - protein, 21 aa, synthetic construct
  REGION 1..21: note = Synthetic
GEAFAAALDGFRRLPYRLSSE

SEQ ID NO: 4078 - protein, 21 aa, synthetic construct
  REGION 1..21: note = Synthetic
DSIFSKMYNCWRKCALGDEKK

SEQ ID NO: 4079 - protein, 28 aa, synthetic construct
  REGION 1..28: note = Synthetic
NILRLFQEIINSITEKNLSFSPFVSLHI

SEQ ID NO: 4080 - protein, 37 aa, synthetic construct
  REGION 1..37: note = Synthetic
IAAVVDVIRELGICPDDAAVIPIKSNRFYTTETLKVE

SEQ ID NO: 4081 - protein, 34 aa, synthetic construct
  REGION 1..34: note = Synthetic
MTEYMNFVEEMGIEDENVQRVMDTDTCPNKIRIR

SEQ ID NO: 4082 - protein, 42 aa, synthetic construct
  REGION 1..42: note = Synthetic
LQNAGTQLKRLVDTLPQETRINIMKLTEKILTSPLCKQDLRF

SEQ ID NO: 4083 - protein, 17 aa, synthetic construct
  REGION 1..17: note = Synthetic
AAKEFVSWLKTGRGRRD

SEQ ID NO: 4084 - protein, 33 aa, synthetic construct
  REGION 1..33: note = Synthetic
NEVMEKFDRALKTLPVHMRIVLDLSQGKGELGP

SEQ ID NO: 4085 - protein, 30 aa, synthetic construct
  REGION 1..30: note = Synthetic
LTVLDGAAGDLLLRLMHLANRQQQGKQPGL

SEQ ID NO: 4086 - protein, 18 aa, synthetic construct
  REGION 1..18: note = Synthetic
DVFQCINNICKCVSHHRT

SEQ ID NO: 4087 - protein, 20 aa, synthetic construct
  REGION 1..20: note = Synthetic
SDLVSSAQRFIYNLQSIYST

SEQ ID NO: 4088 - protein, 20 aa, synthetic construct
  REGION 1..20: note = Synthetic
LAEQLMEKIKSLWYTKVLGY

SEQ ID NO: 4089 - protein, 22 aa, synthetic construct
  REGION 1..22: note = Synthetic
SDAISYVTKLASNALAFINHLF

SEQ ID NO: 4090 - protein, 22 aa, synthetic construct
  REGION 1..22: note = Synthetic
SDAISYVTKLASNALAFINHLY

SEQ ID NO: 4091 - protein, 30 aa, synthetic construct
  REGION 1..30: note = Synthetic
GKRGMGAWPSWTLNCQHSDTLARWLDGCKL

SEQ ID NO: 4092 - protein, 18 aa, synthetic construct
  REGION 1..18: note = Synthetic
LSSVIRNVFKICSENIFV

SEQ ID NO: 4093 - protein, 28 aa, synthetic construct
  REGION 1..28: note = Synthetic
DKAEHAWHDAMDKMYFVIFSSLDGHPVQ

SEQ ID NO: 4094 - protein, 12 aa, synthetic construct
  REGION 1..12: note = Synthetic
FQEAYRRFYGIA

SEQ ID NO: 4095 - protein, 24 aa, synthetic construct
  REGION 1..24: note = Synthetic
VLDWFGQGLNAMGNAISRYYCDAE

SEQ ID NO: 4096 - protein, 19 aa, synthetic construct
  REGION 1..19: note = Synthetic
KWVEEAIAYLDMKTPTPKP

SEQ ID NO: 4097 - protein, 26 aa, synthetic construct
  REGION 1..26: note = Synthetic
DAVQSACKYVRQAAVAARATQALIKK

SEQ ID NO: 4098 - protein, 12 aa, synthetic construct
  REGION 1..12: note = Synthetic
GIPKVMNDAGRR

SEQ ID NO: 4099 - protein, 21 aa, synthetic construct
  REGION 1..21: note = Synthetic
RTLWKIWDYICEVLTWIWGED

SEQ ID NO: 4100 - protein, 42 aa, synthetic construct
  REGION 1..42: note = Synthetic
ACKCIKSAAGGLNAGKAAGIPSMCGVSVPYAISASVDCSKIR

SEQ ID NO: 4101 - protein, 42 aa, synthetic construct; identical to SEQ ID NO: 4100
  REGION 1..42: note = Synthetic

SEQ ID NO: 4102 - protein, 42 aa, synthetic construct; identical to SEQ ID NO: 4100
  REGION 1..42: note = Synthetic

SEQ ID NO: 4103 - protein, 28 aa, synthetic construct
  REGION 1..28: note = Synthetic
RDYYGSVPSYCNRIGTPIAECACSLTPC

SEQ ID NO: 4104 - protein, 23 aa, synthetic construct
  REGION 1..23: note = Synthetic
GQALGKFLQEVLWEDTNEALADE

SEQ ID NO: 4105 - protein, 11 aa, synthetic construct
  REGION 1..11: note = Synthetic
EWIQKGLEWVE

SEQ ID NO: 4106 - protein, 21 aa, synthetic construct
  REGION 1..21: note = Synthetic
RAFDCLGQCGRCDFHKLQCVH

SEQ ID NO: 4107 - protein, 21 aa, synthetic construct
  REGION 1..21: note = Synthetic
CDSARKCCEGLVCRLWCKKII

SEQ ID NO: 4108 - protein, 29 aa, synthetic construct
  REGION 1..29: note = Synthetic
DDVAKDVEEVVDEIVDEVADAVEDAEKTE

SEQ ID NO: 4109 - protein, 21 aa, synthetic construct
  REGION 1..21: note = Synthetic
ALQKYLASILGSRTSPPPPSR

SEQ ID NO: 4110 - protein, 21 aa, synthetic construct
  REGION 1..21: note = Synthetic
ALQKYLASILGSRTSPPPPSR

SEQ ID NO: 4111 - protein, 14 aa, synthetic construct
  REGION 1..14: note = Synthetic
FWHCVDSVCKCFFF

SEQ ID NO: 4112 - protein, 22 aa, synthetic construct
  REGION 1..22: note = Synthetic
CNEGWEKCASYYSPIAECCRKK

SEQ ID NO: 4113 - protein, 35 aa, synthetic construct
  REGION 1..35: note = Synthetic
TAFSSVTHICRDVNYGWIIRYMHANGASMFFICLF

SEQ ID NO: 4114 - protein, 28 aa, synthetic construct
  REGION 1..28: note = Synthetic
TAFSSVTHICRDVNYGWIIRYMHANGAS

SEQ ID NO: 4115 - protein, 28 aa, synthetic construct
  REGION 1..28: note = Synthetic
TAFSSVTHICRDVNYGWIIRYMHANGAS

SEQ ID NO: 4116 - protein, 27 aa, synthetic construct
  REGION 1..27: note = Synthetic
DAEQAWNQAFDCIYEVIFSNLDGHPVV

SEQ ID NO: 4117 - protein, 11 aa, synthetic construct
  REGION 1..11: note = Synthetic
IGALFARGGNL

SEQ ID NO: 4118 - protein, 42 aa, synthetic construct
  REGION 1..42: note = Synthetic
CLKSAANAIKGIDMGKAAGLPGACGVNIPYKISPSTDCSKVQ

SEQ ID NO: 4119 - protein, 13 aa, synthetic construct
  REGION 1..13: note = Synthetic
ERLRKMGGDLNSP

SEQ ID NO: 4120 - protein, 42 aa, synthetic construct
  REGION 1..42: note = Synthetic
DNLPSIGRAILNKRTTCMHDVGSKIYCGPKKQRFLLCWSTKL

SEQ ID NO: 4121 - protein, 20 aa, synthetic construct
  REGION 1..20: note = Synthetic
GGFRLGGHCGHPKIRCCRRK

SEQ ID NO: 4122 - protein, 29 aa, synthetic construct
  REGION 1..29: note = Synthetic
ENLHDIAHSLASGISDAIQKGVEDFEDVA

SEQ ID NO: 4123 - protein, 42 aa, synthetic construct
  REGION 1..42: note = Synthetic
KHVIGIASKLGKRSEEKRFWPFMGKRSEEKRFWPFMGKRSEE

SEQ ID NO: 4124 - protein, 27 aa, synthetic construct
  REGION 1..27: note = Synthetic
CQTFCSSLSAVLIGVCESGICCCILNQ

SEQ ID NO: 4125 - protein, 12 aa, synthetic construct
  REGION 1..12: note = Synthetic
VNKACSGCTHGK

SEQ ID NO: 4126 - protein, 33 aa, synthetic construct
  REGION 1..33: note = Synthetic
DDCAKYCSQFTDVHPACLGGYCECLRWEGGISS

SEQ ID NO: 4127 - protein, 36 aa, synthetic construct
  REGION 1..36: note = Synthetic
RGCKGFGDSCTPGKNERCPNYACSSKHKWCKVYLGK

SEQ ID NO: 4128 - protein, 40 aa, synthetic construct
  REGION 1..40: note = Synthetic
LDRASDGGNAVAKKSDVTARFNWRCCLIPACRRNHKKFCG

SEQ ID NO: 4129 - protein, 12 aa, synthetic construct
  REGION 1..12: note = Synthetic
METILEEVMTEV

SEQ ID NO: 4130 - protein, 28 aa, synthetic construct
  REGION 1..28: note = Synthetic
CRDWYDECCEGFYCSCRQPPKCICRNNN

SEQ ID NO: 4131 - protein, 15 aa, synthetic construct
  REGION 1..15: note = Synthetic
LEKVLNKAPRVVTSQ

SEQ ID NO: 4132 - protein, 11 aa, synthetic construct
  REGION 1..11: note = Synthetic
WRALETLLEDY

SEQ ID NO: 4133 - protein, 12 aa, synthetic construct
  REGION 1..12: note = Synthetic
FREVVDDLMGYD

SEQ ID NO: 4134 - protein, 12 aa, synthetic construct
  REGION 1..12: note = Synthetic
FREVVDDLMGYD

SEQ ID NO: 4135 - protein, 22 aa, synthetic construct
  REGION 1..22: note = Synthetic
DNVAQAWNDAFDQVYAIVLSRY

SEQ ID NO: 4136 - protein, 21 aa, synthetic construct
  REGION 1..21: note = Synthetic
GMAALMEELRGLGQGIQGQQY

SEQ ID NO: 4137 - protein, 20 aa, synthetic construct
  REGION 1..20: note = Synthetic
LAEQLMEKVKNLWYTRVLGY

SEQ ID NO: 4138 - protein, 24 aa, synthetic construct
  REGION 1..24: note = Synthetic
CAAHCLAIGRRGGSCERGVCICRR

SEQ ID NO: 4139 - protein, 24 aa, synthetic construct
  REGION 1..24: note = Synthetic
MYGGCGGNANNFKTIDECHRTCVG

SEQ ID NO: 4140 - protein, 20 aa, synthetic construct
  REGION 1..20: note = Synthetic
MAQYAAELRRYINMLTRPRY

SEQ ID NO: 4141 - protein, 28 aa, synthetic construct
  REGION 1..28: note = Synthetic
LMSTLKGAATNAAVTLLNKLQCKLTGTC

SEQ ID NO: 4142 - protein, 39 aa, synthetic construct
  REGION 1..39: note = Synthetic
TCVDSMADPVRVKRFWPLVPVAINTVAAGINLYKAIRRK

SEQ ID NO: 4143 - protein, 24 aa, synthetic construct
  REGION 1..24: note = Synthetic
RKIAQLLNKVADAAKKGEKVDMFD

SEQ ID NO: 4144 - protein, 21 aa, synthetic construct
  REGION 1..21: note = Synthetic
ATLERLLGQAPQSTQNQNAAK

SEQ ID NO: 4145 - protein, 42 aa, synthetic construct
  REGION 1..42: note = Synthetic
RSWTAVAGDGLKREIRRECAATCPPSKLGLTVFCCTTDNCNH

SEQ ID NO: 4146 - protein, 41 aa, synthetic construct
  REGION 1..41: note = Synthetic
CRCLKSVAGAYNAGRAAGIPSRCGVSVPYTISASVDCSKIH

SEQ ID NO: 4147 - protein, 39 aa, synthetic construct
  REGION 1..39: note = Synthetic
DLCNEALQSWQSAAPARTSAHLGLALACGLLALLWAPGL

SEQ ID NO: 4148 - protein, 22 aa, synthetic construct
  REGION 1..22: note = Synthetic
DVFDCISDMITDYCSGQMEDDH

SEQ ID NO: 4149 - protein, 27 aa, synthetic construct
  REGION 1..27: note = Synthetic
YLKSLYGGYGNGNGEFWEEYIDERYDK

SEQ ID NO: 4150 - protein, 17 aa, synthetic construct
  REGION 1..17: note = Synthetic
LIDVVDEYISGVQTVGK

SEQ ID NO: 4151 - protein, 17 aa, synthetic construct
  REGION 1..17: note = Synthetic
DIEDVANYVLSKADKGW

SEQ ID NO: 4152 - protein, 38 aa, synthetic construct
  REGION 1..38: note = Synthetic
RFCTEIGKDCGTSWECCEDCCIHGTCSHESNCANFKLR

SEQ ID NO: 4153 - protein, 26 aa, synthetic construct
  REGION 1..26: note = Synthetic
AKALFNKLTEYLKKKISGEDAAKKDT

SEQ ID NO: 4154 - protein, 21 aa, synthetic construct
  REGION 1..21: note = Synthetic
QSIADTIKDAFDKAQAVFMDA

SEQ ID NO: 4155 - protein, 25 aa, synthetic construct
  REGION 1..25: note = Synthetic
MKEYLESCEHACDSLIQEEIFNYFQ

SEQ ID NO: 4156 - protein, 32 aa, synthetic construct
  REGION 1..32: note = Synthetic
EKLDNALKYIIEKLKIHDTPEKICTDIHFCVV

SEQ ID NO: 4157 - protein, 39 aa, synthetic construct
  REGION 1..39: note = Synthetic
QYLEVIHSAVQILLSLVGFVYACYVISISMEEEDTCRNK

SEQ ID NO: 4158 - protein, 11 aa, synthetic construct
  REGION 1..11: note = Synthetic
WRALETLLEEY

SEQ ID NO: 4159 - protein, 11 aa, synthetic construct
  REGION 1..11: note = Synthetic
TGWRLCENILA

SEQ ID NO: 4160 - protein, 15 aa, synthetic construct
  REGION 1..15: note = Synthetic
NALALVNNFAAKHKH

SEQ ID NO: 4161 - protein, 14 aa, synthetic construct
  REGION 1..14: note = Synthetic
AGLMAAIFGAMLLL

SEQ ID NO: 4162 - protein, 30 aa, synthetic construct
  REGION 1..30: note = Synthetic
RCRDWYNDCCDGFYCSCRQPPYCICRNNNG

SEQ ID NO: 4163 - protein, 22 aa, synthetic construct
  REGION 1..22: note = Synthetic
KSFKDFLQNILHLAEAHAVKRG

SEQ ID NO: 4164 - protein, 27 aa, synthetic construct
  REGION 1..27: note = Synthetic
ADQAANEWGRSGKDPNHFRPAGLPDKY

SEQ ID NO: 4165 - protein, 27 aa, synthetic construct
  REGION 1..27: note = Synthetic
ADQAANEWGRSGKDPNHFRPKGLPDKY

SEQ ID NO: 4166 - protein, 27 aa, synthetic construct
  REGION 1..27: note = Synthetic
ADQAANEWGRSGKDPNHFRPKGLPDKY

SEQ ID NO: 4167 - protein, 22 aa, synthetic construct
  REGION 1..22: note = Synthetic
LMEHIKEFFNEMLTKEDVKLFD

SEQ ID NO: 4168 - protein, 42 aa, synthetic construct
  REGION 1..42: note = Synthetic
CMKSAASSITKLNTNNAAALPGKCGVNIPYKISTSTNCNTVK

SEQ ID NO: 4169 - protein, 24 aa, synthetic construct
  REGION 1..24: note = Synthetic
NDCQRYCQSVKECKYGKCYCNYAG

SEQ ID NO: 4170 - protein, 37 aa, synthetic construct
  REGION 1..37: note = Synthetic
GMRVVRGCAASCPSPIGGEEVSCCSTDNCNNSFSRFF

SEQ ID NO: 4171 - protein, 12 aa, synthetic construct
  REGION 1..12: note = Synthetic
GGCHELCHCCGS

SEQ ID NO: 4172 - protein, 11 aa, synthetic construct
  REGION 1..11: note = Synthetic
VAMIEAVIEKY

SEQ ID NO: 4173 - protein, 16 aa, synthetic construct
  REGION 1..16: note = Synthetic
FSNAAQSIASDAQNLG

SEQ ID NO: 4174 - protein, 31 aa, synthetic construct
  REGION 1..31: note = Synthetic
WQVIGQLVSTGAIMLLGPAIIILLALKKGNL

SEQ ID NO: 4175 - protein, 27 aa, synthetic construct
  REGION 1..27: note = Synthetic
SVARHAARDLRRWMWCNLKVCVGGLVV

SEQ ID NO: 4176 - protein, 12 aa, synthetic construct
  REGION 1..12: note = Synthetic
GLPKVMNEAGRR

SEQ ID NO: 4177 - protein, 30 aa, synthetic construct
  REGION 1..30: note = Synthetic
VNQVAKSINDLDYTPIMKSMENLDNGMDML

SEQ ID NO: 4178 - protein, 18 aa, synthetic construct
  REGION 1..18: note = Synthetic
NILSSIVNGINRALSFFG

SEQ ID NO: 4179 - protein, 31 aa, synthetic construct
  REGION 1..31: note = Synthetic
RRLKGVAKKGLGKGCFGLKLDRIGSMSGLGC

SEQ ID NO: 4180 - protein, 25 aa, synthetic construct
  REGION 1..25: note = Synthetic
GLLSVLGSVAKHVLPHVVPVIAEHL

SEQ ID NO: 4181 - protein, 25 aa, synthetic construct
  REGION 1..25: note = Synthetic
GLLSVLGSVAKHVLPHVVPVIAEHL

SEQ ID NO: 4182 - protein, 25 aa, synthetic construct
  REGION 1..25: note = Synthetic
GLLSVLGSVAKHVLPHVVPVIAEHL

SEQ ID NO: 4183 - protein, 25 aa, synthetic construct
  REGION 1..25: note = Synthetic
GLLSVLGSVAKHVLPHVVPVIAEHL

SEQ ID NO: 4184 - protein, 20 aa, synthetic construct
  REGION 1..20: note = Synthetic
AGGCATGFLRTADGRCKPTF

SEQ ID NO: 4185 - protein, 39 aa, synthetic construct
  REGION 1..39: note = Synthetic
TGMAGGEEAIGGQFMQRMVKKSVPFKPRLGKRAQVCGGD

SEQ ID NO: 4186 - protein, 20 aa, synthetic construct
  REGION 1..20: note = Synthetic
MAEYVADLRRYINMLTRPRY

SEQ ID NO: 4187 - protein, 30 aa, synthetic construct
  REGION 1..30: note = Synthetic
AISKIVDAAEDILQQALNAVPDAHHNCVFG

SEQ ID NO: 4188 - protein, 13 aa, synthetic construct
  REGION 1..13: note = Synthetic
AAKEFVSWLKTGR

SEQ ID NO: 4189 - protein, 13 aa, synthetic construct
  REGION 1..13: note = Synthetic
AAKEFVSWLKTGR

SEQ ID NO: 4190 - protein, 12 aa, synthetic construct
  REGION 1..12: note = Synthetic
ICTNYGQCVRHF

SEQ ID NO: 4191 - protein, 20 aa, synthetic construct
  REGION 1..20: note = Synthetic
VLDIFKDAAKQILAHAAEQI

SEQ ID NO: 4192 - protein, 41 aa, synthetic construct
  REGION 1..41: note = Synthetic
RNLKRAMATGSGSNLRLRKSEMPADPYHVTICEIWGEESSS

SEQ ID NO: 4193 - protein, 15 aa, synthetic construct
  REGION 1..15: note = Synthetic
LANTINQLATKCLSK

SEQ ID NO: 4194 - protein, 16 aa, synthetic construct
  REGION 1..16: note = Synthetic
RDVVRDAQELVNNLTA

SEQ ID NO: 4195 - protein, 25 aa, synthetic construct
  REGION 1..25: note = Synthetic
GLLGVLGSVAKHVLPHVVPVIAEHL

SEQ ID NO: 4196 - protein, 15 aa, synthetic construct
  REGION 1..15: note = Synthetic
FPDCCNSICAQFICL

SEQ ID NO: 4197 - protein, 20 aa, synthetic construct
  REGION 1..20: note = Synthetic
SQAGGGMSSFKTRVKSRILK

SEQ ID NO: 4198 - protein, 40 aa, synthetic construct
  REGION 1..40: note = Synthetic
VSELKRIGRELSVQNEVDRFSPGGPDPQHHSYPLSSKPRI

SEQ ID NO: 4199 - protein, 12 aa, synthetic construct
  REGION 1..12: note = Synthetic
LLDMVTGLLGNL

SEQ ID NO: 4200 - protein, 39 aa, synthetic construct
  REGION 1..39: note = Synthetic
GDLERAAASLPAFCNVDIPNGTGGVCYWLGYPRTPRTGH

SEQ ID NO: 4201 - protein, 26 aa, synthetic construct
  REGION 1..26: note = Synthetic
FQQALTDILDGMTEVAEETGEGGREG

SEQ ID NO: 4202 - protein, 12 aa, synthetic construct
  REGION 1..12: note = Synthetic
FQEAYRRFYGIA

SEQ ID NO: 4203 - protein, 33 aa, synthetic construct
  REGION 1..33: note = Synthetic
GRNAAANAFDLIALIARQNCCSIPSCWEKYKCS

SEQ ID NO: 4204 - protein, 21 aa, synthetic construct
  REGION 1..21: note = Synthetic
RTMAKTFIEWLEKQNSNDQTD

SEQ ID NO: 4205 - protein, 25 aa, synthetic construct
  REGION 1..25: note = Synthetic
IPDAIQRALDYIRSLPPPKENQKFK

SEQ ID NO: 4206 - protein, 25 aa, synthetic construct
  REGION 1..25: note = Synthetic
IPDAIQRALDYIRSLPPPKENQKFK

SEQ ID NO: 4207 - protein, 12 aa, synthetic construct
  REGION 1..12: note = Synthetic
VLNSLDNLVSGL

SEQ ID NO: 4208 - protein, 28 aa, synthetic construct
  REGION 1..28: note = Synthetic
LFKDGLNTVQEGLQKLNETFLQAPAAST

SEQ ID NO: 4209 - protein, 22 aa, synthetic construct
  REGION 1..22: note = Synthetic
AIKCIDHVCKFVSNLSQFEDLF

SEQ ID NO: 4210 - protein, 26 aa, synthetic construct
  REGION 1..26: note = Synthetic
TGLSNALDNLSSSHTKKRACFWKYCV

SEQ ID NO: 4211 - protein, 21 aa, synthetic construct
  REGION 1..21: note = Synthetic
GMAALMEELRGLGQGIQGQQY

SEQ ID NO: 4212 - protein, 21 aa, synthetic construct
  REGION 1..21: note = Synthetic
GMAALMEELRGLGQGIQGQQY

SEQ ID NO: 4213 - protein, 21 aa, synthetic construct
  REGION 1..21: note = Synthetic
GMAALMEELRGLGQGIQGQQY

SEQ ID NO: 4214 - protein, 21 aa, synthetic construct
  REGION 1..21: note = Synthetic
GMAALMEELRGLGQGIQGQQY

SEQ ID NO: 4215 - protein, 21 aa, synthetic construct
  REGION 1..21: note = Synthetic
GMAALMEELRGLGQGIQGQQY

SEQ ID NO: 4216 - protein, 12 aa, synthetic construct
  REGION 1..12: note = Synthetic
FQEAYQRFYGPV

SEQ ID NO: 4217 - protein, 25 aa, synthetic construct
  REGION 1..25: note = Synthetic
SDAAKKLQEFITFEKGIDGPFTSKN

SEQ ID NO: 4218 - protein, 42 aa, synthetic construct
  REGION 1..42: note = Synthetic
CLKSAYNSISGVNAGNAASFPGKCGVSIPYKISPSTDCSKVQ

SEQ ID NO: 4219 - protein, 26 aa, synthetic construct
  REGION 1..26: note = Synthetic
GGGGKKCGGHGEYGSGVIIGAERPKK

SEQ ID NO: 4220 - protein, 18 aa, synthetic construct
  REGION 1..18: note = Synthetic
NILSSIANGINRALSFFG

SEQ ID NO: 4221 - protein, 15 aa, synthetic construct
  REGION 1..15: note = Synthetic
RFLEGLLNTVTGLLG

SEQ ID NO: 4222 - protein, 23 aa, synthetic construct
  REGION 1..23: note = Synthetic
GIVDQCCNNICTFNQLQNYCNVP

SEQ ID NO: 4223 - protein, 21 aa, synthetic construct
  REGION 1..21: note = Synthetic
TAVKLFRNFLTSFFNNQASTG

SEQ ID NO: 4224 - protein, 16 aa, synthetic construct
  REGION 1..16: note = Synthetic
KLAKTVAKQAAKKQME

SEQ ID NO: 4225 - protein, 27 aa, synthetic construct
  REGION 1..27: note = Synthetic
RILEDIVSTALATCCKFQFLNFCCNEK

SEQ ID NO: 4226 - protein, 21 aa, synthetic construct
  REGION 1..21: note = Synthetic
LRDLKGALESLIEEETGQKKI

SEQ ID NO: 4227 - protein, 28 aa, synthetic construct
  REGION 1..28: note = Synthetic
QQCLKPCKAAFGISAGGKCINGKCKCYP

SEQ ID NO: 4228 - protein, 38 aa, synthetic construct
  REGION 1..38: note = Synthetic
ITKASTCAKKIFKRHNFRAWYGWRNHCDGKTLPDTSNC

SEQ ID NO: 4229 - protein, 26 aa, synthetic construct
  REGION 1..26: note = Synthetic
ACAGGCVSICGHCAPTCGCGYGGLYY

SEQ ID NO: 4230 - protein, 23 aa, synthetic construct
  REGION 1..23: note = Synthetic
TDFYKVFEKCWDVVSAASSPTAT

SEQ ID NO: 4231 - protein, 27 aa, synthetic construct
  REGION 1..27: note = Synthetic
DLWNSIKDMAAAAGRAALNAVTGMVNQ

SEQ ID NO: 4232 - protein, 39 aa, synthetic construct
  REGION 1..39: note = Synthetic
DMAKSALRELKSCIDELQPVHKEQLVKLLVQVLDAQEDT

SEQ ID NO: 4233 - protein, 19 aa, synthetic construct
  REGION 1..19: note = Synthetic
SELESVLRKLLDQAKAITQ

SEQ ID NO: 4234 - protein, 38 aa, synthetic construct
  REGION 1..38: note = Synthetic
VDHLGTEVKGLLGLLEELAWNLPPGPFSPAPDLLGDGF

SEQ ID NO: 4235 - protein, 12 aa, synthetic construct
  REGION 1..12: note = Synthetic
FQEAYRRFYGTA

SEQ ID NO: 4236 - protein, 17 aa, synthetic construct
  REGION 1..17: note = Synthetic
VANYVDQVVNSAGDAHG

SEQ ID NO: 4237 - protein, 38 aa, synthetic construct
  REGION 1..38: note = Synthetic
NCAKKIVSGAGGMKNWVKWRLHCAGRPLSYWMTGCHLA

SEQ ID NO: 4238 - protein, 24 aa, synthetic construct
  REGION 1..24: note = Synthetic
EMMNKAFYPINQVICYFNDPSQCP

SEQ ID NO: 4239 - protein, 32 aa, synthetic construct
  REGION 1..32: note = Synthetic
YGGCGGNANNFHTLEECVKVCGVRSRDSPKEN

SEQ ID NO: 4240 - protein, 31 aa, synthetic construct
  REGION 1..31: note = Synthetic
LQQFAEQFMEIIQQIYNSLGYPGIEEKEKVQ

SEQ ID NO: 4241 - protein, 11 aa, synthetic construct
  REGION 1..11: note = Synthetic
VTMIEAVMEKY

SEQ ID NO: 4242 - protein, 33 aa, synthetic construct
  REGION 1..33: note = Synthetic
FGKRALRDLNKYDYMSDPSFSAEDIKALRELFR

SEQ ID NO: 4243 - protein, 17 aa, synthetic construct
  REGION 1..17: note = Synthetic
MKCCSNGCGHACKPPVF

SEQ ID NO: 4244 - protein, 17 aa, synthetic construct
  REGION 1..17: note = Synthetic
MKCCSNGCGHACKPPVF

SEQ ID NO: 4245 - protein, 26 aa, synthetic construct
  REGION 1..26: note = Synthetic
DHAKRILQTFESRYDCCKTFECCHWG

SEQ ID NO: 4246 - protein, 13 aa, synthetic construct
  REGION 1..13: note = Synthetic
QYSRLGGNWARNK

SEQ ID NO: 4247 - protein, 25 aa, synthetic construct
  REGION 1..25: note = Synthetic
WLAGCPSGWHNCKSSGQLIGACCKQ

SEQ ID NO: 4248 - protein, 24 aa, synthetic construct
  REGION 1..24: note = Synthetic
DLTDAMEDVLDIFEEGIIPQKKEL

SEQ ID NO: 4249 - protein, 24 aa, synthetic construct
  REGION 1..24: note = Synthetic
DLTDAMEDVLDIFEEGIIPQKKEL

SEQ ID NO: 4250 - protein, 24 aa, synthetic construct
  REGION 1..24: note = Synthetic
DLTDAMEDVLDIFEEGIIPQKKEL

SEQ ID NO: 4251 - protein, 24 aa, synthetic construct
  REGION 1..24: note = Synthetic
DLTDAMEDVLDIFEEGIIPQKKEL

SEQ ID NO: 4252 - protein, 24 aa, synthetic construct
  REGION 1..24: note = Synthetic
DLTDAMEDVLDIFEEGIIPQKKEL

SEQ ID NO: 4253 - protein, 24 aa, synthetic construct
  REGION 1..24: note = Synthetic
DLTDAMEDVLDIFEEGIIPQKKEL

SEQ ID NO: 4254 - protein, 35 aa, synthetic construct
  REGION 1..35: note = Synthetic
FQSLKEFMDACDILGLSKAAVILPKDASRTHTILP

SEQ ID NO: 4255 - protein, 23 aa, synthetic construct
  REGION 1..23: note = Synthetic
REAERLAYEATSVANDVHDHQAP

SEQ ID NO: 4256 - protein, 20 aa, synthetic construct
  REGION 1..20: note = Synthetic
LAEQLMEKIKTLWYTKVLGY

SEQ ID NO: 4257 - protein, 18 aa, synthetic construct
  REGION 1..18: note = Synthetic
NILSSIANGINRALSFFG

SEQ ID NO: 4258 - protein, 33 aa, synthetic construct
  REGION 1..33: note = Synthetic
SSLKDYCSTFKGKFTGFWDSASEAKPTPASDAF

SEQ ID NO: 4259 - protein, 21 aa, synthetic construct
  REGION 1..21: note = Synthetic
GEAFAAALDGFRRLPYRLSSE

SEQ ID NO: 4260 - protein, 41 aa, synthetic construct
  REGION 1..41: note = Synthetic
ADNVIGFCQECAHHCLQRKRVLGECRWFTCHCSRITIGVGL

SEQ ID NO: 4261 - protein, 21 aa, synthetic construct
  REGION 1..21: note = Synthetic
DTFGAQLQSLLKKKMILEMIN

SEQ ID NO: 4262 - protein, 16 aa, synthetic construct
  REGION 1..16: note = Synthetic
EAEDAASYFCHQWSSY

SEQ ID NO: 4263 - protein, 33 aa, synthetic construct
  REGION 1..33: note = Synthetic
DLVRNIKNLISSIVTAIVTAVTTVLATEGNING

SEQ ID NO: 4264 - protein, 25 aa, synthetic construct
  REGION 1..25: note = Synthetic
LDSMKGYWTSLIGRLSGFLDSTPSS

SEQ ID NO: 4265 - protein, 32 aa, synthetic construct
  REGION 1..32: note = Synthetic
LSNMLRNLMHLVNQTKCPVNETKITKLQDFLS

SEQ ID NO: 4266 - protein, 24 aa, synthetic construct
  REGION 1..24: note = Synthetic
LRGCASTCHEGPYNVCCSTDLCNK

SEQ ID NO: 4267 - protein, 23 aa, synthetic construct
  REGION 1..23: note = Synthetic
AKTGYKGLGHCLGEYDECQSRSY

SEQ ID NO: 4268 - protein, 24 aa, synthetic construct
  REGION 1..24: note = Synthetic
AAKECHDVLSSFSRLALLSPCPMS

SEQ ID NO: 4269 - protein, 27 aa, synthetic construct
  REGION 1..27: note = Synthetic
IATFVTDIFQGAKYFRVKMDIKLYECY

SEQ ID NO: 4270 - protein, 11 aa, synthetic construct
  REGION 1..11: note = Synthetic
LEDCDNACARY

SEQ ID NO: 4271 - protein, 16 aa, synthetic construct
  REGION 1..16: note = Synthetic
TQYSRLGGNWPRNKKS

SEQ ID NO: 4272 - protein, 33 aa, synthetic construct
  REGION 1..33: note = Synthetic
EICDRGCKRYGATSGFCKEFSKGENFCWCKGLR

SEQ ID NO: 4273 - protein, 13 aa, synthetic construct
  REGION 1..13: note = Synthetic
GKDLSDWVDGCEL

SEQ ID NO: 4274 - protein, 11 aa, synthetic construct
  REGION 1..11: note = Synthetic
VAMIEAVMEKY

SEQ ID NO: 4275 - protein, 21 aa, synthetic construct
  REGION 1..21: note = Synthetic
GFLHHGCRCCARADEVPEVRN

SEQ ID NO: 4276 - protein, 29 aa, synthetic construct
  REGION 1..29: note = Synthetic
AVKKYLNSILNGKRSSEGDSADFLEELEK

SEQ ID NO: 4277 - protein, 29 aa, synthetic construct
  REGION 1..29: note = Synthetic
AVKKYLNSILNGKRSSEGESPDFPEELEK

SEQ ID NO: 4278 - protein, 29 aa, synthetic construct
  REGION 1..29: note = Synthetic
AVKKYLNSILNGKRSSEGDSPDFLEELEK

SEQ ID NO: 4279 - protein, 29 aa, synthetic construct
  REGION 1..29: note = Synthetic
AVKKYLNSILNGKRSSEGESPDFLEELEK

SEQ ID NO: 4280 - protein, 31 aa, synthetic construct
  REGION 1..31: note = Synthetic
RDAGNVLDHGFQRRRECPPRCPTSHCNAGTC

SEQ ID NO: 4281 - protein, 26 aa, synthetic construct
  REGION 1..26: note = Synthetic
YSIIDKLGKIVDDLVLCMEENAPKLT

SEQ ID NO: 4282 - protein, 24 aa, synthetic construct
  REGION 1..24: note = Synthetic
AENMLQLVSDFLTSASLISSTNIH

SEQ ID NO: 4283 - protein, 22 aa, synthetic construct
  REGION 1..22: note = Synthetic
SNFKDLVDSLLQVLNVKEGTPS

SEQ ID NO: 4284 - protein, 11 aa, synthetic construct
  REGION 1..11: note = Synthetic
INAVSALANHG

SEQ ID NO: 4285 - protein, 22 aa, synthetic construct
  REGION 1..22: note = Synthetic
ICKSFQSLVHRFGHVTVAPTSV

SEQ ID NO: 4286 - protein, 29 aa, synthetic construct
  REGION 1..29: note = Synthetic
KAGASSITDVGACTFLFFANTLMCLFYLS

SEQ ID NO: 4287 - protein, 30 aa, synthetic construct
  REGION 1..30: note = Synthetic
KFVSDVADYFWKMAKMSGKVIGNGIANQNE

SEQ ID NO: 4288 - protein, 30 aa, synthetic construct; identical to SEQ ID NO: 4287
  REGION 1..30: note = Synthetic

SEQ ID NO: 4289 - protein, 21 aa, synthetic construct
  REGION 1..21: note = Synthetic
SRLCQLMDKLIRNADNEASLK

SEQ ID NO: 4290 - protein, 17 aa, synthetic construct
  REGION 1..17: note = Synthetic
VENLANELNHLLTHARN

SEQ ID NO: 4291 - protein, 15 aa, synthetic construct
  REGION 1..15: note = Synthetic
SFYTILADCCRRPRG

SEQ ID NO: 4292 - protein, 15 aa, synthetic construct
  REGION 1..15: note = Synthetic
SYPQYMTSGYASNWN

SEQ ID NO: 4293 - protein, 15 aa, synthetic construct
  REGION 1..15: note = Synthetic
SYPQYMTSGYASNWN

SEQ ID NO: 4294 - protein, 20 aa, synthetic construct
  REGION 1..20: note = Synthetic
LAQYYSDLYQYITFITRPRF

SEQ ID NO: 4295 - protein, 18 aa, synthetic construct
  REGION 1..18: note = Synthetic
DSLKSFIEEAAKEVTTEA

SEQ ID NO: 4296 - protein, 24 aa, synthetic construct
  REGION 1..24: note = Synthetic
DLTDAMEDVLDIFEEGIIPQKKEL

SEQ ID NO: 4297 - protein, 15 aa, synthetic construct
  REGION 1..15: note = Synthetic
LFSNIGYVITDMLES

SEQ ID NO: 4298 - protein, 34 aa, synthetic construct
  REGION 1..34: note = Synthetic
KVAEKVADKIKEAAEVVKTVVADSDDAGQEHNEL

SEQ ID NO: 4299 - protein, 16 aa, synthetic construct
  REGION 1..16: note = Synthetic
NLFSNIGYVITDMLES

SEQ ID NO: 4300 - protein, 42 aa, synthetic construct
  REGION 1..42: note = Synthetic
KLWEGFKSIVGKRGLNDRDQLDDLFDSDLSDADIKLLKEMFK

SEQ ID NO: 4301 - protein, 30 aa, synthetic construct
  REGION 1..30: note = Synthetic
LRYIRGCAATCPGTKPRDMVECCSTDRCNR

SEQ ID NO: 4302 - protein, 30 aa, synthetic construct; identical to SEQ ID NO: 4301
  REGION 1..30: note = Synthetic

SEQ ID NO: 4303 - protein, 26 aa, synthetic construct
  REGION 1..26: note = Synthetic
NNLRKIADQACDNLTDNVNDFIPQEY

SEQ ID NO: 4304 - protein, 20 aa, synthetic construct
  REGION 1..20: note = Synthetic
SELLSIVRDIAESFWDCPYD

SEQ ID NO: 4305 - protein, 18 aa, synthetic construct
  REGION 1..18: note = Synthetic
CSRCCSYAGEAVQTQPGH

SEQ ID NO: 4306 - protein, 37 aa, synthetic construct
  REGION 1..37: note = Synthetic
STGVEKLRDIYDKSVDAVGTYTSILTDQLYHWWCGEQ

SEQ ID NO: 4307 - protein, 13 aa, synthetic construct
  REGION 1..13: note = Synthetic
KRLTKMGGDLNSP

SEQ ID NO: 4308 - protein, 41 aa, synthetic construct
  REGION 1..41: note = Synthetic
SLQDAGAGAGRRCICTTRTCRFPYRRLGTCIFQNRVYTFCC

SEQ ID NO: 4309 - protein, 41 aa, synthetic construct
  REGION 1..41: note = Synthetic
SLQDAGAGAGRRCICTTRTCRFPYRRLGTCLFQNRVYTFCC

SEQ ID NO: 4310 - protein, 11 aa, synthetic construct
  REGION 1..11: note = Synthetic
ISAVSALADHF

SEQ ID NO: 4311 - protein, 37 aa, synthetic construct
  REGION 1..37: note = Synthetic
LSSLQDYWSSFKGKWSGFGFWDATPEEASPTPAPEGI

SEQ ID NO: 4312 - protein, 34 aa, synthetic construct
  REGION 1..34: note = Synthetic
SDLCSLAKTAFSDCTAYVAGAELKACTLAQGKII

SEQ ID NO: 4313 - protein, 37 aa, synthetic construct
  REGION 1..37: note = Synthetic
YGGCGGNANNFSSYYECHIKCFGPRAIIFPEDSPKEN

SEQ ID NO: 4314 - protein, 22 aa, synthetic construct
  REGION 1..22: note = Synthetic
LMENIQDAFKDAVDSSDEHTLH

SEQ ID NO: 4315 - protein, 22 aa, synthetic construct
  REGION 1..22: note = Synthetic
LMENIQDAFKDAVDSSDEHTLH

SEQ ID NO: 4316 - protein, 30 aa, synthetic construct
  REGION 1..30: note = Synthetic
KFVSEVADYFWKMAKMSGKVIGNGIASQNE

SEQ ID NO: 4317 - protein, 33 aa, synthetic construct
  REGION 1..33: note = Synthetic
AAGGDRVFDAVVVVKAWLKSKELVSFTPASSTK

SEQ ID NO: 4318 - protein, 33 aa, synthetic construct; identical to SEQ ID NO: 4317
  REGION 1..33: note = Synthetic

SEQ ID NO: 4319 - protein, 39 aa, synthetic construct
  REGION 1..39: note = Synthetic
LLNQVTEIINDWQEKDDSQRKDIFDLKEKFPFVDFIGFD

SEQ ID NO: 4320 - protein, 25 aa, synthetic construct
  REGION 1..25: note = Synthetic
VLSAYWKDLNNYHRFSGMGFGPETP

SEQ ID NO: 4321 - protein, 32 aa, synthetic construct
  REGION 1..32: note = Synthetic
TPLKSGASSIIDAGACSFLFFANTLMCLFYLS

SEQ ID NO: 4322 - protein, 13 aa, synthetic construct
  REGION 1..13: note = Synthetic
KRLTKMGGDLNSP

SEQ ID NO: 4323 - protein, 35 aa, synthetic construct
  REGION 1..35: note = Synthetic
EVIDDIKEAVNQVCNGNVVSCADILVAAARDSVVE

SEQ ID NO: 4324 - protein, 28 aa, synthetic construct
  REGION 1..28: note = Synthetic
MIDECRKLMKSCDYFLLLDADMILKVHP

SEQ ID NO: 4325 - protein, 20 aa, synthetic construct
  REGION 1..20: note = Synthetic
NTALNAAKNFVAEKIGATPS

SEQ ID NO: 4326 - protein, 15 aa, synthetic construct
  REGION 1..15: note = Synthetic
DLSSVAKTLIHRLHK

SEQ ID NO: 4327 - protein, 26 aa, synthetic construct
  REGION 1..26: note = Synthetic
HAFEFMQRALQDLKKTAYNLDTRVRT

SEQ ID NO: 4328 - protein, 34 aa, synthetic construct
  REGION 1..34: note = Synthetic
HAFEFMQRALQDLKKTAYNLDTRVCVSIEMLLLR

SEQ ID NO: 4329 - protein, 13 aa, synthetic construct
  REGION 1..13: note = Synthetic
GKDLTDWVDGCDL

SEQ ID NO: 4330 - protein, 12 aa, synthetic construct
  REGION 1..12: note = Synthetic
FYGSYVGLGSSL

SEQ ID NO: 4331 - protein, 28 aa, synthetic construct
  REGION 1..28: note = Synthetic
QELSTLLEKVLNWISFFKILKRMWRDTK

SEQ ID NO: 4332 - protein, 24 aa, synthetic construct
  REGION 1..24: note = Synthetic
CAAHCLAIGRKGGSCQNGVCVCRN

SEQ ID NO: 4333 - protein, 41 aa, synthetic construct
  REGION 1..41: note = Synthetic
CEGWADAGCGLLELLDTSGAPEKRQHPGRRAELEDELPGLE

SEQ ID NO: 4334 - protein, 26 aa, synthetic construct
  REGION 1..26: note = Synthetic
IATFVTDIFQGAKYFRVKMDVKLYEC

SEQ ID NO: 4335 - protein, 26 aa, synthetic construct
  REGION 1..26: note = Synthetic
IATFVTDIFQGAKYFRVKMDVKLYEC

SEQ ID NO: 4336 - protein, 37 aa, synthetic construct
  REGION 1..37: note = Synthetic
TFMGCLKNCADVKGIRWSVYLVNFRCCRSHDLCNEDL

SEQ ID NO: 4337 - protein, 29 aa, synthetic construct
  REGION 1..29: note = Synthetic
HRCHRGGNGGYGGGSGEVVVIGAEKPKDK

SEQ ID NO: 4338 - protein, 31 aa, synthetic construct
  REGION 1..31: note = Synthetic
CAKVKGICKTFCDDDEYDYGYCIKWRNQCCI

SEQ ID NO: 4339 - protein, 24 aa, synthetic construct
  REGION 1..24: note = Synthetic
ATFGKQICGKCEQESTELHCHCRR

SEQ ID NO: 4340 - protein, 26 aa, synthetic construct
  REGION 1..26: note = Synthetic
AAFDAIGTRFNDEAQKQLAHHGLPHT

SEQ ID NO: 4341 - protein, 36 aa, synthetic construct
  REGION 1..36: note = Synthetic
NTALNAAKNLVAEKIGATPSEAGQMPFDEFMDILYE

SEQ ID NO: 4342 - protein, 36 aa, synthetic construct
  REGION 1..36: note = Synthetic
CYDCFREGLTKVYSYCCHKYNHMYEWCLEYFSGEMK

SEQ ID NO: 4343 - protein, 24 aa, synthetic construct
  REGION 1..24: note = Synthetic
ILNAFGQAMTAMGNAVSRYYCDAE

SEQ ID NO: 4344 - protein, 26 aa, synthetic construct
  REGION 1..26: note = Synthetic
IATFVTDIFQGAKYFRVKMDVKLYEC

SEQ ID NO: 4345 - protein, 27 aa, synthetic construct
  REGION 1..27: note = Synthetic
SWGDNVAAAWEHALENTYTVAFEVIPA

SEQ ID NO: 4346 - protein, 29 aa, synthetic construct
  REGION 1..29: note = Synthetic
SLADQAANEWGRSGKDPNHFRPAGLPEKY

SEQ ID NO: 4347 - protein, 30 aa, synthetic construct
  REGION 1..30: note = Synthetic
KFVKDVADYFWEMAKISGQVVSNGIANQNE

SEQ ID NO: 4348 - protein, 27 aa, synthetic construct
  REGION 1..27: note = Synthetic
YLKSLYGGYGNGNGEFREEYIDERYDN

SEQ ID NO: 4349 - protein, 30 aa, synthetic construct
  REGION 1..30: note = Synthetic
KVGGLLGTLAEELNGYSRKKGGFSFRFGRR

SEQ ID NO: 4350 - protein, 25 aa, synthetic construct
  REGION 1..25: note = Synthetic
LRTVAELLNKVADAAEKKENIDFFN

SEQ ID NO: 4351 - protein, 41 aa, synthetic construct
  REGION 1..41: note = Synthetic
ISAIANQVKNGKNAMPSFSRLSDSDIEDVANYVLSKADKGW

SEQ ID NO: 4352 - protein, 17 aa, synthetic construct
  REGION 1..17: note = Synthetic
KCCKNGCGFMTCTTARP

SEQ ID NO: 4353 - protein, 27 aa, synthetic construct
  REGION 1..27: note = Synthetic
SGYNGVGKCFDDPKVPGRSNCGCLYNC

SEQ ID NO: 4354 - protein, 11 aa, synthetic construct
  REGION 1..11: note = Synthetic
YTAVADCCHQA

SEQ ID NO: 4355 - protein, 26 aa, synthetic construct
  REGION 1..26: note = Synthetic
AIWSGFKNWVNTDCASHNPFVCKSPA

SEQ ID NO: 4356 - protein, 12 aa, synthetic construct
  REGION 1..12: note = Synthetic
EYLENWVKEFED

SEQ ID NO: 4357 - protein, 17 aa, synthetic construct
  REGION 1..17: note = Synthetic
GQHAGGKCINGKCKCYP

SEQ ID NO: 4358 - protein, 17 aa, synthetic construct
  REGION 1..17: note = Synthetic
GQHAGGKCINGKCKCYP

SEQ ID NO: 4359 - protein, 37 aa, synthetic construct
  REGION 1..37: note = Synthetic
HRLAGLLSSAGSMANSNLLPTEMGFKVSGRRRRDLQA

SEQ ID NO: 4360 - protein, 26 aa, synthetic construct
  REGION 1..26: note = Synthetic
IATFVTDIFQGAKYFRVKMDIKLYEC

SEQ ID NO: 4361 - protein, 30 aa, synthetic construct; identical to SEQ ID NO: 4301
  REGION 1..30: note = Synthetic

SEQ ID NO: 4362 - protein, 30 aa, synthetic construct
  REGION 1..30: note = Synthetic
LRYIRGCAATCPGTKPRDMVECCNTDRCNR

SEQ ID NO: 4363 - protein, 32 aa, synthetic construct
  REGION 1..32: note = Synthetic
RKLETVVNEIVDEMNYLKRRETKLRDTNGKLL

SEQ ID NO: 4364 - protein, 24 aa, synthetic construct
  REGION 1..24: note = Synthetic
FCQACWRFAGTCGPYVGRAMAIGV

SEQ ID NO: 4365 - protein, 30 aa, synthetic construct; identical to SEQ ID NO: 4301
  REGION 1..30: note = Synthetic

SEQ ID NO: 4366 - protein, 28 aa, synthetic construct
  REGION 1..28: note = Synthetic
ASSIFKTLRTIANDDCELCVNVACTGCL

SEQ ID NO: 4367 - protein, 28 aa, synthetic construct
  REGION 1..28: note = Synthetic
ASSIFKTLRTIANDDCELCVNVACTGCL

SEQ ID NO: 4368 - protein, 28 aa, synthetic construct
  REGION 1..28: note = Synthetic
ASSIFKTLRTIANDDCELCVNVACTGCL

SEQ ID NO: 4369 - protein, 29 aa, synthetic construct
  REGION 1..29: note = Synthetic
AQEILQRLEEIAEDPSTCEICAYAACTGC

SEQ ID NO: 4370 - protein, 34 aa, synthetic construct
  REGION 1..34: note = Synthetic
NFNGILENGGTTLSKKTVLLLVTPFLAAAWSLHP

SEQ ID NO: 4371 - protein, 23 aa, synthetic construct
  REGION 1..23: note = Synthetic
HAFEFMQRALQDLKKTAYNLDTR

SEQ ID NO: 4372 - protein, 23 aa, synthetic construct
  REGION 1..23: note = Synthetic
HAFEFMQRALQDLKKTAYNLDTR

SEQ ID NO: 4373 - protein, 23 aa, synthetic construct
  REGION 1..23: note = Synthetic
HAFEFMQRALQDLKKTAYNLDTR

SEQ ID NO: 4374 - protein, 23 aa, synthetic construct
  REGION 1..23: note = Synthetic
HAFEFMQRALQDLKKTAYNLDTR

SEQ ID NO: 4375 - protein, 23 aa, synthetic construct
  REGION 1..23: note = Synthetic
HAFEFMQRALQDLKKTAYNLDTR

SEQ ID NO: 4376 - protein, 23 aa, synthetic construct
  REGION 1..23: note = Synthetic
HAFEFMQRALQDLKKTAYNLDTR

SEQ ID NO: 4377 - protein, 23 aa, synthetic construct
  REGION 1..23: note = Synthetic
HAFEFMQRALQDLKKTAYNLDTR

SEQ ID NO: 4378 - protein, 23 aa, synthetic construct
  REGION 1..23: note = Synthetic
HAFEFMQRALQDLKKTAYNLDMR

SEQ ID NO: 4379 - protein, 23 aa, synthetic construct
  REGION 1..23: note = Synthetic
HAFEFMQRALQDLKKTAYNLDAR

SEQ ID NO: 4380 - protein, 35 aa, synthetic construct
  REGION 1..35: note = Synthetic
GKQLGKQFRRGCAATCPEGKPNEIVQCCSTDECNH

SEQ ID NO: 4381 - protein, 21 aa, synthetic construct
  REGION 1..21: note = Synthetic
DPVNEICTSASNLCHTIRDEL

SEQ ID NO: 4382 - protein, 30 aa, synthetic construct
  REGION 1..30: note = Synthetic
AKEVEDLVSEIADELGDDVDDDAQTPEKTK

SEQ ID NO: 4383 - protein, 30 aa, synthetic construct
  REGION 1..30: note = Synthetic
CSKCFYTCAEKMKYCAKTCGFCTKGACKDC

SEQ ID NO: 4384 - protein, 19 aa, synthetic construct
  REGION 1..19: note = Synthetic
AITEMAECCSGFCLIYRCS

SEQ ID NO: 4385 - protein, 41 aa, synthetic construct
  REGION 1..41: note = Synthetic
SLEDAGAGAGRRCICTTRTCRFPYRRLGTCIFQNRVYTFCC

SEQ ID NO: 4386 - protein, 15 aa, synthetic construct
  REGION 1..15: note = Synthetic
LPHLASGLASLVLSK

SEQ ID NO: 4387 - protein, 13 aa, synthetic construct
  REGION 1..13: note = Synthetic
KRLTKMGGDLNSP

SEQ ID NO: 4388 - protein, 15 aa, synthetic construct
  REGION 1..15: note = Synthetic
DIRHALQNLLSTISQ

SEQ ID NO: 4389 - protein, 25 aa, synthetic construct
  REGION 1..25: note = Synthetic
VQRAIQIASSIIDEIEEFGRRVESC

SEQ ID NO: 4390 - protein, 24 aa, synthetic construct
  REGION 1..24: note = Synthetic
EAMNLLTYMLHGLSRRHNILRWLK

SEQ ID NO: 4391 - protein, 34 aa, synthetic construct
  REGION 1..34: note = Synthetic
REALEEFKKLVQRKGLSEEDIFTPLQTGSCVPEH

SEQ ID NO: 4392 - protein, 21 aa, synthetic construct
  REGION 1..21: note = Synthetic
QSIADTIKDAFDKAQAVFADA

SEQ ID NO: 4393 - protein, 32 aa, synthetic construct
  REGION 1..32: note = Synthetic
NEVMEKFNRALKTLPVHMQLLNPTQAEEQCLI

SEQ ID NO: 4394 - protein, 28 aa, synthetic construct
  REGION 1..28: note = Synthetic
ASSIFKTLRTIANDDCELCVNVACTGCL

SEQ ID NO: 4395 - protein, 33 aa, synthetic construct
  REGION 1..33: note = Synthetic
TRIYQIAKNLPNVCNMKQIGTCPFIAIPFFPPY

SEQ ID NO: 4396 - protein, 33 aa, synthetic construct; identical to SEQ ID NO: 4395
  REGION 1..33: note = Synthetic

SEQ ID NO: 4397 - protein, 33 aa, synthetic construct; identical to SEQ ID NO: 4395
  REGION 1..33: note = Synthetic

SEQ ID NO: 4398 - protein, 23 aa, synthetic construct
  REGION 1..23: note = Synthetic
DYGNSYFGYFDVWGAGTTVTVSS

SEQ ID NO: 4399 - protein, 26 aa, synthetic construct
  REGION 1..26: note = Synthetic
AFDFLTHVLHLVSDADAEHHLLQSDE

SEQ ID NO: 4400 - protein, 15 aa, synthetic construct
  REGION 1..15: note = Synthetic
CQSVAASCARSCGSC

SEQ ID NO: 4401 - protein, 17 aa, synthetic construct
  REGION 1..17: note = Synthetic
CGDAHHFYRGCTCSCQG

SEQ ID NO: 4402 - protein, 23 aa, synthetic construct
  REGION 1..23: note = Synthetic
HAFEFMQRALQDLKKTAYNLDTR

SEQ ID NO: 4403 - protein, 23 aa, synthetic construct
  REGION 1..23: note = Synthetic
HAFEFMQRALQDLKKTAYNLDTR

SEQ ID NO: 4404 - protein, 23 aa, synthetic construct
  REGION 1..23: note = Synthetic
HAFEFMQRALQDLKKTAYNLDTR

SEQ ID NO: 4405 - protein, 23 aa, synthetic construct
  REGION 1..23: note = Synthetic
HAFEFMQRALQDLKKTAYNLDTR

SEQ ID NO: 4406 - protein, 23 aa, synthetic construct
  REGION 1..23: note = Synthetic
HAFEFMQRALQDLKKTAYNLDTR

SEQ ID NO: 4407 - protein, 23 aa, synthetic construct
  REGION 1..23: note = Synthetic
HAFEFMQRALQDLKKTAYNLDTR

SEQ ID NO: 4408 - protein, 23 aa, synthetic construct
  REGION 1..23: note = Synthetic
HAFEFMQRALQDLKKTAYNLDTR

SEQ ID NO: 4409 - protein, 23 aa, synthetic construct
  REGION 1..23: note = Synthetic
HAFEFMQRALQDLKKTAYNLDTR

SEQ ID NO: 4410 - protein, 35 aa, synthetic construct
  REGION 1..35: note = Synthetic
LRDLRDAFSRVKTFFQMKDQLDNLLLKESLLEDFK

SEQ ID NO: 4411 - protein, 26 aa, synthetic construct
  REGION 1..26: note = Synthetic
SWGDNVAAAWNHALDNTYAVALKSLE

SEQ ID NO: 4412 - protein, 26 aa, synthetic construct
  REGION 1..26: note = Synthetic
SWGDNVAAAWNHALDNTYAVALKSLE

SEQ ID NO: 4413 - protein, 34 aa, synthetic construct
  REGION 1..34: note = Synthetic
NTCSTFVHGGCQGNNNNFQSEANCLNTCKNKRFP

SEQ ID NO: 4414 - protein, 42 aa, synthetic construct
  REGION 1..42: note = Synthetic
CIDECKEIGAGYGYCYGFGCYCEGFPENKPTWPLPNKTCGRK

SEQ ID NO: 4415 - protein, 24 aa, synthetic construct
  REGION 1..24: note = Synthetic
KRLLEGIEKIISQAYPEAKGNEIY

SEQ ID NO: 4416 - protein, 34 aa, synthetic construct
  REGION 1..34: note = Synthetic
KIAEKVAEKVAEAANVVKTIVQDTDSDAQEHNEL

SEQ ID NO: 4417 - protein, 12 aa, synthetic construct
  REGION 1..12: note = Synthetic
LQDAYQRFYGPV

SEQ ID NO: 4418 - protein, 42 aa, synthetic construct
  REGION 1..42: note = Synthetic
CYGAAGTCARVVCDCDRTAALCFGDSEYIEGHKNIDTARFCQ

SEQ ID NO: 4419 - protein, 39 aa, synthetic construct
  REGION 1..39: note = Synthetic
QDMREAGAQLKKLVDTLPQKPRESIIKLMEKIAQSSLCN

SEQ ID NO: 4420 - protein, 42 aa, synthetic construct
  REGION 1..42: note = Synthetic
GGGGGGGGGGSRRLKGLPKKGLGSGCFGLKLDRIGSMSGLGC

SEQ ID NO: 4421 - protein, 15 aa, synthetic construct
  REGION 1..15: note = Synthetic
SVAGVAKKGYRKSSY

SEQ ID NO: 4422 - protein, 25 aa, synthetic construct
  REGION 1..25: note = Synthetic
EYYNNGGGLYSKDAKKELKDPSTSA

SEQ ID NO: 4423 - protein, 34 aa, synthetic construct
  REGION 1..34: note = Synthetic
LSRYAKLANRLANPKLLETFLSKWIGDRGNRSVK

SEQ ID NO: 4424 - protein, 24 aa, synthetic construct
  REGION 1..24: note = Synthetic
CAAHCLAIGRKGGACQNGVCVCRR

SEQ ID NO: 4425 - protein, 30 aa, synthetic construct
  REGION 1..30: note = Synthetic
MTSAVDFINEVIKHFQANPMAGRKIRSDEL

SEQ ID NO: 4426 - protein, 36 aa, synthetic construct
  REGION 1..36: note = Synthetic
ECDRVAANCFAENLKTYNKKYWLSSIIDCKEESEKC

SEQ ID NO: 4427 - protein, 21 aa, synthetic construct
  REGION 1..21: note = Synthetic
GVVDQCCTSICSLYQLQNYCN

SEQ ID NO: 4428 - protein, 24 aa, synthetic construct
  REGION 1..24: note = Synthetic
AVEQCTKACSTLCTKGSMTAVEAT

SEQ ID NO: 4429 - protein, 31 aa, synthetic construct
  REGION 1..31: note = Synthetic
NKGMEEFKKIVRTLTIPYTMIEAQTREMCRV

SEQ ID NO: 4430 - protein, 34 aa, synthetic construct; identical to SEQ ID NO: 4298
  REGION 1..34: note = Synthetic

SEQ ID NO: 4431 - protein, 34 aa, synthetic construct; identical to SEQ ID NO: 4298
  REGION 1..34: note = Synthetic

SEQ ID NO: 4432 - protein, 33 aa, synthetic construct
  REGION 1..33: note = Synthetic
SGYCQWVGKYGNGCWCIELPDNVPIRVPGKCHR

SEQ ID NO: 4433 - protein, 38 aa, synthetic construct
  REGION 1..38: note = Synthetic
DKAREVINRIKQSEFPAKTRDWFSETFRKVKEKLKINS

SEQ ID NO: 4434 - protein, 24 aa, synthetic construct
  REGION 1..24: note = Synthetic
AVERCTKACSTICTKGSKTAVETV

SEQ ID NO: 4435 - protein, 39 aa, synthetic construct
  REGION 1..39: note = Synthetic
DIATRCGGTGDSCNEPAGELCCRRLKCVNSRCCPTTDGC

SEQ ID NO: 4436 - protein, 22 aa, synthetic construct
  REGION 1..22: note = Synthetic
CGRAWSEGSKVCFICNRESSMC

SEQ ID NO: 4437 - protein, 17 aa, synthetic construct
  REGION 1..17: note = Synthetic
NKFLTILDQLINKIIVN

SEQ ID NO: 4438 - protein, 24 aa, synthetic construct
  REGION 1..24: note = Synthetic
AVDRCANACSTVCTKDSMNAVETA

SEQ ID NO: 4439 - protein, 22 aa, synthetic construct
  REGION 1..22: note = Synthetic
LMQKIQDAVKDALDSSDEHTLH

SEQ ID NO: 4440 - protein, 16 aa, synthetic construct
  REGION 1..16: note = Synthetic
NILNQIREVVSSALSG

SEQ ID NO: 4441 - protein, 26 aa, synthetic construct
  REGION 1..26: note = Synthetic
AAKTAADALAAAKKTAADAAAAAAKP

SEQ ID NO: 4442 - protein, 42 aa, synthetic construct
  REGION 1..42: note = Synthetic
LQNAGTQLKRLVDTLPQETRINIVKLTEKILTSPLCEQDLRV

SEQ ID NO: 4443 - protein, 38 aa, synthetic construct
  REGION 1..38: note = Synthetic
VGPCDQVCSRIDPEKDECCRAHGYRGHSSCYYGRMECY

SEQ ID NO: 4444 - protein, 20 aa, synthetic construct
  REGION 1..20: note = Synthetic
RLKGYLRAYCSQQKVCRCVQ

SEQ ID NO: 4445 - protein, 40 aa, synthetic construct
  REGION 1..40: note = Synthetic
SNIVRTIMEFLSFLHLKEAGALDSLPGIPLATSSEDLEQS

SEQ ID NO: 4446 - protein, 40 aa, synthetic construct
  REGION 1..40: note = Synthetic
SNIVRTIMEFLSFLHLKEAGALDSLPGIPLATSSEDLEKS

SEQ ID NO: 4447 - protein, 11 aa, synthetic construct
  REGION 1..11: note = Synthetic
DFTGIADSIIK

SEQ ID NO: 4448 - protein, 17 aa, synthetic construct
  REGION 1..17: note = Synthetic
DSILKLMDKIAKSPLCA

SEQ ID NO: 4449 - protein, 21 aa, synthetic construct
  REGION 1..21: note = Synthetic
RSFRNGVGTGMKKTSFQRAKS

SEQ ID NO: 4450 - protein, 11 aa, synthetic construct
  REGION 1..11: note = Synthetic
LSAALATWFSF

SEQ ID NO: 4451 - protein, 27 aa, synthetic construct
  REGION 1..27: note = Synthetic
QVGQILRECAKNLKNESTAEAFPGDEV

SEQ ID NO: 4452 - protein, 38 aa, synthetic construct
  REGION 1..38: note = Synthetic
ADCVGDGQKCADWFGPYCCSGYYCSCRSMPYCRCRSDS

SEQ ID NO: 4453 - protein, 32 aa, synthetic construct
  REGION 1..32: note = Synthetic
SYALTWIDECIRTCSRRGYTFAGTGVWFYISL

SEQ ID NO: 4454 - protein, 13 aa, synthetic construct
  REGION 1..13: note = Synthetic
LAGVLAVGAALVI

SEQ ID NO: 4455 - protein, 18 aa, synthetic construct
  REGION 1..18: note = Synthetic
KNVVEDIKKILQKMWPWK

SEQ ID NO: 4456 - protein, 11 aa, synthetic construct
  REGION 1..11: note = Synthetic
LSAALATWLSF

SEQ ID NO: 4457 - protein, 11 aa, synthetic construct
  REGION 1..11: note = Synthetic
LSAALATWLSF

SEQ ID NO: 4458 - protein, 11 aa, synthetic construct
  REGION 1..11: note = Synthetic
LSAALATWLSF

SEQ ID NO: 4459 - protein, 34 aa, synthetic construct
  REGION 1..34: note = Synthetic
ANKANRMMRKIMRKLPPDTLEELFQIYKKTRDQK

SEQ ID NO: 4460 - protein, 33 aa, synthetic construct
  REGION 1..33: note = Synthetic
RARDFVDDAVKEWEYDLTEVTNRNAPHCRPNCC

SEQ ID NO: 4461 - protein, 23 aa, synthetic construct
  REGION 1..23: note = Synthetic
GQPLGKFLQDILWEEVTEAPADK

SEQ ID NO: 4462 - protein, 42 aa, synthetic construct
  REGION 1..42: note = Synthetic
KLWEGVKSAIGKRSLRNQDQFDNMFDSDLSDADLKLLDDLFD

SEQ ID NO: 4463 - protein, 13 aa, synthetic construct
  REGION 1..13: note = Synthetic
KRLTKMGGDLNSP

SEQ ID NO: 4464 - protein, 11 aa, synthetic construct
  REGION 1..11: note = Synthetic
GHGGASNYVRL

SEQ ID NO: 4465 - protein, 32 aa, synthetic construct
  REGION 1..32: note = Synthetic
KVPEALQSVAQGLTQGIDDSFSEGIAVYEQFL

SEQ ID NO: 4466 - protein, 23 aa, synthetic construct
  REGION 1..23: note = Synthetic
CQDMLGTFKGWHFCTCYSGRPGC

SEQ ID NO: 4467 - protein, 22 aa, synthetic construct
  REGION 1..22: note = Synthetic
TDYCSRIFAIFNCLRQEILTKS

SEQ ID NO: 4468 - protein, 29 aa, synthetic construct
  REGION 1..29: note = Synthetic
AQEILQRLEEIAEDPGTCEICAYAACTGC

SEQ ID NO: 4469 - protein, 27 aa, synthetic construct
  REGION 1..27: note = Synthetic
QQVLTEIDDAFNNAIAAYGGKYMTEKN

SEQ ID NO: 4470 - protein, 11 aa, synthetic construct
  REGION 1..11: note = Synthetic
EWINGGLEWAE

SEQ ID NO: 4471 - protein, 34 aa, synthetic construct
  REGION 1..34: note = Synthetic
SGYCQWFGRYGNACWCIKLPDKVPIKVPGKCNGR

SEQ ID NO: 4472 - protein, 15 aa, synthetic construct
  REGION 1..15: note = Synthetic
SYYTVIADCCRKPRG

SEQ ID NO: 4473 - protein, 21 aa, synthetic construct
  REGION 1..21: note = Synthetic
AVQKYLAAVLGRRYRQRVRNK

SEQ ID NO: 4474 - protein, 33 aa, synthetic construct
  REGION 1..33: note = Synthetic
KIAEKVASKVAEAADVLKTIVVDSDDGQEHNEL

SEQ ID NO: 4475 - protein, 42 aa, synthetic construct
  REGION 1..42: note = Synthetic
NKASGFIATLCTKVLDFGIDKLIQLIEDKVDANAICAKIHAC

SEQ ID NO: 4476 - protein, 25 aa, synthetic construct
  REGION 1..25: note = Synthetic
GGWKGGGGGGGGWKGGGGGGKGGGG

SEQ ID NO: 4477 - protein, 21 aa, synthetic construct
  REGION 1..21: note = Synthetic
GIVDQCCTSICSLYQLENYCN

SEQ ID NO: 4478 - protein, 21 aa, synthetic construct
  REGION 1..21: note = Synthetic
GIVDQCCTSICSLYQLENYCN

SEQ ID NO: 4479 - protein, 21 aa, synthetic construct
  REGION 1..21: note = Synthetic
GIVDQCCTSICSLYQLENYCN

SEQ ID NO: 4480 - protein, 13 aa, synthetic construct
  REGION 1..13: note = Synthetic
GFQEAYRRFYGTT

SEQ ID NO: 4481 - protein, 28 aa, synthetic construct
  REGION 1..28: note = Synthetic
KFADYVDDCLNRAFSFSAASTGNSVLSL

SEQ ID NO: 4482 - protein, 24 aa, synthetic construct
  REGION 1..24: note = Synthetic
LEKGVQIARQCFCSEKDVIYKKDI

SEQ ID NO: 4483 - protein, 28 aa, synthetic construct
  REGION 1..28: note = Synthetic
MIDECRKLMKSCDYFLLLDADMILKVHP

SEQ ID NO: 4484 - protein, 38 aa, synthetic construct
  REGION 1..38: note = Synthetic
ELLRRLRDIFAAKRNFTRHQQQKATREPESSHSRWRKR

SEQ ID NO: 4485 - protein, 17 aa, synthetic construct
  REGION 1..17: note = Synthetic
ILDVITDAVNSAMNAMG

SEQ ID NO: 4486 - protein, 23 aa, synthetic construct
  REGION 1..23: note = Synthetic
EAFSEVIESAPEAKTDQVTSTVV

SEQ ID NO: 4487 - protein, 19 aa, synthetic construct
  REGION 1..19: note = Synthetic
YGSSYFDYWGQGTTLTVSS

SEQ ID NO: 4488 - protein, 42 aa, synthetic construct
  REGION 1..42: note = Synthetic
NKASGFIATLCTKVLDFGVDKLIQLIEDKVDANAICAKIHAC

SEQ ID NO: 4489 - protein, 18 aa, synthetic construct
  REGION 1..18: note = Synthetic
NVLSSVANGINRALSFFG

SEQ ID NO: 4490 - protein, 12 aa, synthetic construct
  REGION 1..12: note = Synthetic
EYLENWAKEFED

SEQ ID NO: 4491 - protein, 33 aa, synthetic construct
  REGION 1..33: note = Synthetic
YCLNIASTIVSLLTTALIMVFTSATYFLYSVSH

SEQ ID NO: 4492 - protein, 26 aa, synthetic construct
  REGION 1..26: note = Synthetic
YAQCTACCKKAGHNKGTCDFFKCKCT

SEQ ID NO: 4493 - protein, 27 aa, synthetic construct
  REGION 1..27: note = Synthetic
YLKSLYGGYGNGNGEFWEEYIDERYDK

SEQ ID NO: 4494 - protein, 12 aa, synthetic construct
  REGION 1..12: note = Synthetic
CSTVEKLMKRGS

SEQ ID NO: 4495 - protein, 21 aa, synthetic construct
  REGION 1..21: note = Synthetic
LRALKGALESLIEEETGQKKI

SEQ ID NO: 4496 - protein, 25 aa, synthetic construct
  REGION 1..25: note = Synthetic
LSVLDKILENIGQSEGSLELTESIF

SEQ ID NO: 4497 - protein, 25 aa, synthetic construct
  REGION 1..25: note = Synthetic
WLAGCPSGWHNCKSSGPLIGACCKQ

SEQ ID NO: 4498 - protein, 20 aa, synthetic construct
  REGION 1..20: note = Synthetic
EIESAVTELVRNVHEQIPDL

SEQ ID NO: 4499 - protein, 32 aa, synthetic construct
  REGION 1..32: note = Synthetic
KASDLMARVLEKDCPPHPVPGMHKCVCLKTCR

SEQ ID NO: 4500 - protein, 33 aa, synthetic construct
  REGION 1..33: note = Synthetic
KQVMEKFSDAVNTLSVRMPIFLDVTQGAERCRI

SEQ ID NO: 4501 - protein, 11 aa, synthetic construct
  REGION 1..11: note = Synthetic
GAPRVLNNAGR

SEQ ID NO: 4502 - protein, 21 aa, synthetic construct
  REGION 1..21: note = Synthetic
NCDKVAAECFARNTYHPNNKH

SEQ ID NO: 4503 - protein, 15 aa, synthetic construct
  REGION 1..15: note = Synthetic
CQSVAAACARSCGGC

SEQ ID NO: 4504 - protein, 27 aa, synthetic construct
  REGION 1..27: note = Synthetic
RKANNLADTLARQARINNSPMVVSWIN

SEQ ID NO: 4505 - protein, 15 aa, synthetic construct
  REGION 1..15: note = Synthetic
LLREASYILENLEHL

SEQ ID NO: 4506 - protein, 15 aa, synthetic construct
  REGION 1..15: note = Synthetic
KNADELMNEAITHLK

SEQ ID NO: 4507 - protein, 35 aa, synthetic construct
  REGION 1..35: note = Synthetic
YFKNCVKNILKDCQTSKIPFDNCRDNLHIDFTKQQ

SEQ ID NO: 4508 - protein, 33 aa, synthetic construct
  REGION 1..33: note = Synthetic
NILSSIMGSLGTIGNVVGNVCCSITKSCCASEE

SEQ ID NO: 4509 - protein, 33 aa, synthetic construct; identical to SEQ ID NO: 4508
  REGION 1..33: note = Synthetic

SEQ ID NO: 4510 - protein, 35 aa, synthetic construct
  REGION 1..35: note = Synthetic
ITAVVDVIRELGICPDDWAVIPIKANRFSITKSLP

SEQ ID NO: 4511 - protein, 21 aa, synthetic construct
  REGION 1..21: note = Synthetic
GMAALMEELRGLGQGIQGQQY

SEQ ID NO: 4512 - protein, 22 aa, synthetic construct
  REGION 1..22: note = Synthetic
AAAESAWTAGLDNIFGLLFAAL

SEQ ID NO: 4513 - protein, 34 aa, synthetic construct
  REGION 1..34: note = Synthetic
ENIVRTVVEFLTYLHLKEAGALDNLPSPEETNES

SEQ ID NO: 4514 - protein, 26 aa, synthetic construct
  REGION 1..26: note = Synthetic
GNYIDNVYGDLEEQKPDFDSKLELPN

SEQ ID NO: 4515 - protein, 22 aa, synthetic construct
  REGION 1..22: note = Synthetic
QQIFNFATSLIRTIYAKLTSFF

SEQ ID NO: 4516 - protein, 38 aa, synthetic construct
  REGION 1..38: note = Synthetic
GCTTCCTGYKGCYYFGKDGKFVCEGESDEPKANMYPVM

SEQ ID NO: 4517 - protein, 40 aa, synthetic construct
  REGION 1..40: note = Synthetic
AGILTMGRRAGAELEPYPCPGRRCPTATATALAPRGGSRV

SEQ ID NO: 4518 - protein, 14 aa, synthetic construct
  REGION 1..14: note = Synthetic
EWVQKYVSDLELSA

SEQ ID NO: 4519 - protein, 35 aa, synthetic construct
  REGION 1..35: note = Synthetic
RTFRSCARTAFRTAKLRRGEKVGATSADAESDETR

SEQ ID NO: 4520 - protein, 17 aa, synthetic construct
  REGION 1..17: note = Synthetic
GYNAAYNRYFRKRRGAE

SEQ ID NO: 4521 - protein, 36 aa, synthetic construct
  REGION 1..36: note = Synthetic
ECDRVATTCFRDNKDTYDIKYWFYGAKNCQEKSEPC

SEQ ID NO: 4522 - protein, 31 aa, synthetic construct
  REGION 1..31: note = Synthetic
VCNGCGDQVAACEAECFRNDVYTACHEAQKG

SEQ ID NO: 4523 - protein, 29 aa, synthetic construct
  REGION 1..29: note = Synthetic
ASSCFNNVNDVLRRDVEVVEYLNDLMDTF

SEQ ID NO: 4524 - protein, 23 aa, synthetic construct
  REGION 1..23: note = Synthetic
HAFEFMQRALQDLKKTACNLDTR

SEQ ID NO: 4525 - protein, 21 aa, synthetic construct
  REGION 1..21: note = Synthetic
QLAQYYSDLYQYITFVTRPRF

SEQ ID NO: 4526 - protein, 36 aa, synthetic construct
  REGION 1..36: note = Synthetic
NEGPKWANTYCAAVCHMSGRGAGSCNAKDECVCSMT

SEQ ID NO: 4527 - protein, 21 aa, synthetic construct
  REGION 1..21: note = Synthetic
GIVEQCCTGICSLYQLENYCN

SEQ ID NO: 4528 - protein, 15 aa, synthetic construct
  REGION 1..15: note = Synthetic
IAAAKAAGQAALGAL

SEQ ID NO: 4529 - protein, 15 aa, synthetic construct
  REGION 1..15: note = Synthetic
IAAAKAAGQAALGAL

SEQ ID NO: 4530 - protein, 15 aa, synthetic construct
  REGION 1..15: note = Synthetic
IAAAKAAGQAALGAL

SEQ ID NO: 4531 - protein, 15 aa, synthetic construct
  REGION 1..15: note = Synthetic
VLSLMSTWFTQLLRV

SEQ ID NO: 4532 - protein, 25 aa, synthetic construct
  REGION 1..25: note = Synthetic
AGHDLSEWLKGCSVRLKTDSSYNNW

SEQ ID NO: 4533 - protein, 25 aa, synthetic construct
  REGION 1..25: note = Synthetic
RSVLTALERAFDEMKSDPNAMALVT

SEQ ID NO: 4534 - protein, 21 aa, synthetic construct
  REGION 1..21: note = Synthetic
GIVEQCCTSICSLYQLENYCN

SEQ ID NO: 4535 - protein, 21 aa, synthetic construct
  REGION 1..21: note = Synthetic
GIVEQCCTSICSLYQLENYCN

SEQ ID NO: 4536 - protein, 21 aa, synthetic construct
  REGION 1..21: note = Synthetic
GIVEQCCTSICSLYQLENYCN

SEQ ID NO: 4537 - protein, 21 aa, synthetic construct
  REGION 1..21: note = Synthetic
GIVEQCCTSICSLYQLENYCN

SEQ ID NO: 4538 - protein, 21 aa, synthetic construct
  REGION 1..21: note = Synthetic
GIVEQCCTSICSLYQLENYCN

SEQ ID NO: 4539 - protein, 21 aa, synthetic construct
  REGION 1..21: note = Synthetic
GIVEQCCTSICSLYQLENYCN

SEQ ID NO: 4540 - protein, 21 aa, synthetic construct
  REGION 1..21: note = Synthetic
GIVEQCCTSICSLYQLENYCN

SEQ ID NO: 4541 - protein, 21 aa, synthetic construct
  REGION 1..21: note = Synthetic
GIVEQCCTSICSLYQLENYCN

SEQ ID NO: 4542 - protein, 21 aa, synthetic construct
  REGION 1..21: note = Synthetic
GIVEQCCTSICSLYQLENYCN

SEQ ID NO: 4543 - protein, 21 aa, synthetic construct
  REGION 1..21: note = Synthetic
GIVEQCCTSICSLYQLENYCN

SEQ ID NO: 4544 - protein, 29 aa, synthetic construct
  REGION 1..29: note = Synthetic
AQEILQRLEEIADDPGTCEICAYAACTGC

SEQ ID NO: 4545 - protein, 12 aa, synthetic construct
  REGION 1..12: note = Synthetic
VAASCARSCGGC

SEQ ID NO: 4546 - protein, 24 aa, synthetic construct
  REGION 1..24: note = Synthetic
WFDRMKQFIEDFLHCFTPLHDIDL

SEQ ID NO: 4547 - protein, 22 aa, synthetic construct
  REGION 1..22: note = Synthetic
LEKYRAALEGLLSEMLPQHAAK

SEQ ID NO: 4548 - protein, 13 aa, synthetic construct
  REGION 1..13: note = Synthetic
KRLTKMGGDLNSP

SEQ ID NO: 4549 - protein, 28 aa, synthetic construct
  REGION 1..28: note = Synthetic
GLWSKIKDVAAAAGKAALGAVNEALGEQ

SEQ ID NO: 4550 - protein, 21 aa, synthetic construct
  REGION 1..21: note = Synthetic
NVTSFLYDALDTLNDPTTTSL

SEQ ID NO: 4551 - protein, 35 aa, synthetic construct
  REGION 1..35: note = Synthetic
SDAAKEVEDLASEIADELGDDVDVDDDAQTTEKTE

SEQ ID NO: 4552 - protein, 17 aa, synthetic construct
  REGION 1..17: note = Synthetic
GGDCIGGLDGIYCCCLA

SEQ ID NO: 4553 - protein, 19 aa, synthetic construct
  REGION 1..19: note = Synthetic
SLGESLESGISKRISINQD

SEQ ID NO: 4554 - protein, 30 aa, synthetic construct
  REGION 1..30: note = Synthetic
ASSCFNNVNDILRQDVEVVEYLNDLMDTFR

SEQ ID NO: 4555 - protein, 40 aa, synthetic construct
  REGION 1..40: note = Synthetic
EAVADAWHWLNLRPGQPMYKREANADAWHWLQLKPGQPMY

SEQ ID NO: 4556 - protein, 42 aa, synthetic construct
  REGION 1..42: note = Synthetic
CLKSAANAIKGIDLNKAAGIPSVCKVNIPYKISPSTDCSTVQ

SEQ ID NO: 4557 - protein, 42 aa, synthetic construct; identical to SEQ ID NO: 4556
  REGION 1..42: note = Synthetic

SEQ ID NO: 4558 - protein, 16 aa, synthetic construct
  REGION 1..16: note = Synthetic
GNTYCGHFHGYIPSCL

SEQ ID NO: 4559 - protein, 31 aa, synthetic construct
  REGION 1..31: note = Synthetic
VCNNCGDQVAACEAECFRNDVYTACHEAQKG

SEQ ID NO: 4560 - protein, 19 aa, synthetic construct
  REGION 1..19: note = Synthetic
RIRKYFTGYCSGDTCHCSG

SEQ ID NO: 4561 - protein, 25 aa, synthetic construct
  REGION 1..25: note = Synthetic
KGFLSGLLNVAGSVCCKVDTSCCSN

SEQ ID NO: 4562 - protein, 26 aa, synthetic construct
  REGION 1..26: note = Synthetic
KGFLSGLLNVAGSVCCKVDTSCCSSQ

SEQ ID NO: 4563 - protein, 25 aa, synthetic construct
  REGION 1..25: note = Synthetic
KGFLSGLLNVAGSVCCKVDTSCCSN

SEQ ID NO: 4564 - protein, 23 aa, synthetic construct
  REGION 1..23: note = Synthetic
KGFLSGLLNVAGSVCCKVDTSCC

SEQ ID NO: 4565 - protein, 26 aa, synthetic construct
  REGION 1..26: note = Synthetic
KGFLSGLLNVAGSVCCKVDTSCCSNQ

SEQ ID NO: 4566 - protein, 16 aa, synthetic construct
  REGION 1..16: note = Synthetic
ENLIDELNQALKDLGL

SEQ ID NO: 4567 - protein, 22 aa, synthetic construct
  REGION 1..22: note = Synthetic
YCVHSMIDDVDYAVCKKIRVLI

SEQ ID NO: 4568 - protein, 33 aa, synthetic construct
  REGION 1..33: note = Synthetic
KIAEKIASKVGEAADVVKTLIQDTDDVQEHNEL

SEQ ID NO: 4569 - protein, 14 aa, synthetic construct
  REGION 1..14: note = Synthetic
LLDVVGNVLHSLGL

SEQ ID NO: 4570 - protein, 29 aa, synthetic construct
  REGION 1..29: note = Synthetic
ENCRTIIDNLMTLARSFAFSLPYSDYIFY

SEQ ID NO: 4571 - protein, 13 aa, synthetic construct
  REGION 1..13: note = Synthetic
SCLEYGHSCWGAH

SEQ ID NO: 4572 - protein, 11 aa, synthetic construct
  REGION 1..11: note = Synthetic
EWLQGGLEWAE

SEQ ID NO: 4573 - protein, 18 aa, synthetic construct
  REGION 1..18: note = Synthetic
ATGFFEELGSKLAGLFTG

SEQ ID NO: 4574 - protein, 17 aa, synthetic construct
  REGION 1..17: note = Synthetic
FTNCVKDLEEAEKEPPE

SEQ ID NO: 4575 - protein, 32 aa, synthetic construct
  REGION 1..32: note = Synthetic
KDAANKAKDAANKAKDAVVDKTQDFMKSEKLN

SEQ ID NO: 4576 - protein, 18 aa, synthetic construct
  REGION 1..18: note = Synthetic
QMEALVQKLMEKTRSISN

SEQ ID NO: 4577 - protein, 33 aa, synthetic construct
  REGION 1..33: note = Synthetic
KVVEKVASVAKQAAEVVETIIADTDDTQEHNEL

SEQ ID NO: 4578 - protein, 33 aa, synthetic construct; identical to SEQ ID NO: 4577
  REGION 1..33: note = Synthetic

SEQ ID NO: 4579 - protein, 33 aa, synthetic construct; identical to SEQ ID NO: 4577
  REGION 1..33: note = Synthetic

SEQ ID NO: 4580 - protein, 33 aa, synthetic construct
  REGION 1..33: note = Synthetic
NIVDKMASKVAEAAEVVKTIVVDTDDGQEHNEL

SEQ ID NO: 4581 - protein, 23 aa, synthetic construct
  REGION 1..23: note = Synthetic
CERFSNALENLDKLLGVGAGEQF

SEQ ID NO: 4582 - protein, 29 aa, synthetic construct
  REGION 1..29: note = Synthetic
AQEILQRLEEIAEDPSTCEICAYAACTGC

SEQ ID NO: 4583 - protein, 16 aa, synthetic construct
  REGION 1..16: note = Synthetic
VGDDVTTLLTRGEALC

SEQ ID NO: 4584 - protein, 35 aa, synthetic construct
  REGION 1..35: note = Synthetic
GSDIIENAVEFILRSMTRSTEFLEHGDKQGEHSSK

SEQ ID NO: 4585 - protein, 33 aa, synthetic construct
  REGION 1..33: note = Synthetic
NVAEKIAEKVGEAAEVIGTIVADSDDGQEHNEL

SEQ ID NO: 4586 - protein, 30 aa, synthetic construct
  REGION 1..30: note = Synthetic
FRDGCESVLNQVTCEYEFYRLDDLSKRCDA

SEQ ID NO: 4587 - protein, 25 aa, synthetic construct
  REGION 1..25: note = Synthetic
QAIEALGSSGGRPSKIAKITDIGLL

SEQ ID NO: 4588 - protein, 25 aa, synthetic construct
  REGION 1..25: note = Synthetic
TGAETLAEEANTLAEALLEEEMMDN

SEQ ID NO: 4589 - protein, 29 aa, synthetic construct
  REGION 1..29: note = Synthetic
ASSCFNNVNDILRQDVEVVEYLNDLMDTF

SEQ ID NO: 4590 - protein, 41 aa, synthetic construct
  REGION 1..41: note = Synthetic
AGATAGLTPVAQRLRRDTHFPICIFCCGCCRKAICGMCCKT

SEQ ID NO: 4591 - protein, 15 aa, synthetic construct
  REGION 1..15: note = Synthetic
IKSGVEKLKNFLQRG

SEQ ID NO: 4592 - protein, 17 aa, synthetic construct
  REGION 1..17: note = Synthetic
YKNCVKDLEEAGKETEE

SEQ ID NO: 4593 - protein, 18 aa, synthetic construct
  REGION 1..18: note = Synthetic
GCATGYLRTADGRCKPTF

SEQ ID NO: 4594 - protein, 42 aa, synthetic construct
  REGION 1..42: note = Synthetic
LSQLCEELSDCANDIECRGDKKCCFSRCAMRYLEPILESTPQ

SEQ ID NO: 4595 - protein, 17 aa, synthetic construct
  REGION 1..17: note = Synthetic
GYNAAYDRYFRQRRGAK

SEQ ID NO: 4596 - protein, 29 aa, synthetic construct
  REGION 1..29: note = Synthetic
AQEMLQRLEEIAEDPSTCEICAYAACTGC

SEQ ID NO: 4597 - protein, 17 aa, synthetic construct
  REGION 1..17: note = Synthetic
RAAYVVDSCLQQCEDKK

SEQ ID NO: 4598 - protein, 17 aa, synthetic construct
  REGION 1..17: note = Synthetic
RAAYVVDSCLQQCEDKK

SEQ ID NO: 4599 - protein, 14 aa, synthetic construct
  REGION 1..14: note = Synthetic
LAEKAPEFARELAN

SEQ ID NO: 4600 - protein, 21 aa, synthetic construct
  REGION 1..21: note = Synthetic
LRDLKGALESLMEEETGQKKI

SEQ ID NO: 4601 - protein, 34 aa, synthetic construct
  REGION 1..34: note = Synthetic
LETIEDLCERAYSAFQCLREDYEMYQNNNNATSE

SEQ ID NO: 4602 - protein, 22 aa, synthetic construct
  REGION 1..22: note = Synthetic
EDVSTAVQNLQKALKLLTTGRE

SEQ ID NO: 4603 - protein, 27 aa, synthetic construct
  REGION 1..27: note = Synthetic
EGGGSDVDGLMDMDYNSANKKRPIHNR

SEQ ID NO: 4604 - protein, 18 aa, synthetic construct
  REGION 1..18: note = Synthetic
GAAQGLVNKASCKLSGQC

SEQ ID NO: 4605 - protein, 42 aa, synthetic construct
  REGION 1..42: note = Synthetic
CLKSAATSIKGINYGKAASLPRQCGVSVPYAISPNTNCNAIH

SEQ ID NO: 4606 - protein, 27 aa, synthetic construct
  REGION 1..27: note = Synthetic
SSIFKTLRTIANDDCELCVNVACTGCL

SEQ ID NO: 4607 - protein, 24 aa, synthetic construct
  REGION 1..24: note = Synthetic
KTAADAAAKAAAKAAAIAAAAASA

SEQ ID NO: 4608 - protein, 15 aa, synthetic construct
  REGION 1..15: note = Synthetic
FLDKVVAYMQTMKQA

SEQ ID NO: 4609 - protein, 23 aa, synthetic construct
  REGION 1..23: note = Synthetic
WSKIKEAAKTAGLMAMGFVNDMV

SEQ ID NO: 4610 - protein, 23 aa, synthetic construct
  REGION 1..23: note = Synthetic
NNMAKSINSGGELIRALDEEEVF

SEQ ID NO: 4611 - protein, 12 aa, synthetic construct
  REGION 1..12: note = Synthetic
LVAFVSAVVALF

SEQ ID NO: 4612 - protein, 41 aa, synthetic construct
  REGION 1..41: note = Synthetic
LQSVGRLASSLRLVNITLGSGTGLIRVGLAPTGFILNLNIN

SEQ ID NO: 4613 - protein, 38 aa, synthetic construct
  REGION 1..38: note = Synthetic
GCTTCCTGYKGCYYFGKNGKFVCEGESDEPKANMYPAM

SEQ ID NO: 4614 - protein, 17 aa, synthetic construct
  REGION 1..17: note = Synthetic
SVLDLCYSIFNSMHKNE

SEQ ID NO: 4615 - protein, 35 aa, synthetic construct
  REGION 1..35: note = Synthetic
TAARTVAKEVLTVVSLGWEMFCPYMSLDLARDRGR

SEQ ID NO: 4616 - protein, 29 aa, synthetic construct
  REGION 1..29: note = Synthetic
AQEILQRLEEIAEDPSTCEICAYAACTGC

SEQ ID NO: 4617 - protein, 29 aa, synthetic construct
  REGION 1..29: note = Synthetic
AQEILQRLEEIAEDPSTCEICAYAACTGC

SEQ ID NO: 4618 - protein, 29 aa, synthetic construct
  REGION 1..29: note = Synthetic
AQEILQRLEEIAEDPSTCEICAYAACTGC

SEQ ID NO: 4619 - protein, 22 aa, synthetic construct
  REGION 1..22: note = Synthetic
EGWEKCASYYTVIADCCRRPRS

SEQ ID NO: 4620 - protein, 17 aa, synthetic construct
  REGION 1..17: note = Synthetic
GYNAAYNRYFRQRRGAK

SEQ ID NO: 4621 - protein, 11 aa, synthetic construct
  REGION 1..11: note = Synthetic
LKALLSRYAGY

SEQ ID NO: 4622 - protein, 37 aa, synthetic construct
  REGION 1..37: note = Synthetic
IAAVVDIIRELGICPNDAAVTPISKNRFYTIKTLVVA

SEQ ID NO: 4623 - protein, 16 aa, synthetic construct
  REGION 1..16: note = Synthetic
FFTAYLQYMRSGNSFY

SEQ ID NO: 4624 - protein, 12 aa, synthetic construct
  REGION 1..12: note = Synthetic
GLSEALERAGRR

SEQ ID NO: 4625 - protein, 12 aa, synthetic construct
  REGION 1..12: note = Synthetic
MATNCAKACNSC

SEQ ID NO: 4626 - protein, 20 aa, synthetic construct
  REGION 1..20: note = Synthetic
GIESLYTGIVGGIVLILGLL

SEQ ID NO: 4627 - protein, 28 aa, synthetic construct
  REGION 1..28: note = Synthetic
ASSIFKTLRTIANDDCELCVNVACTGCL

SEQ ID NO: 4628 - protein, 27 aa, synthetic construct
  REGION 1..27: note = Synthetic
DELHKWVEEAIDMLQLTSSEDHHLTLR

SEQ ID NO: 4629 - protein, 19 aa, synthetic construct
  REGION 1..19: note = Synthetic
HQCPTGLSACIEGKCICLP

SEQ ID NO: 4630 - protein, 17 aa, synthetic construct
  REGION 1..17: note = Synthetic
FQHCVKDLEEAKKEPPE

SEQ ID NO: 4631 - protein, 22 aa, synthetic construct
  REGION 1..22: note = Synthetic
DRAEKVAEDLLRALRMQYEDES

SEQ ID NO: 4632 - protein, 23 aa, synthetic construct
  REGION 1..23: note = Synthetic
LEKYRAALEGLLSEVLLPARNDK

SEQ ID NO: 4633 - protein, 34 aa, synthetic construct
  REGION 1..34: note = Synthetic
GPGGECGGRFGGCAGGQCCSRFGFCGSGPKYCAH

SEQ ID NO: 4634 - protein, 20 aa, synthetic construct
  REGION 1..20: note = Synthetic
DIQKCCKNGCGHMSCTRPST

SEQ ID NO: 4635 - protein, 41 aa, synthetic construct
  REGION 1..41: note = Synthetic
MSGFKGYLSTVPVVFAIWLTFTAGLIIEINRLFPDGLVFSF

SEQ ID NO: 4636 - protein, 27 aa, synthetic construct
  REGION 1..27: note = Synthetic
AEAGTQVIHAGGHTLIQTDRSQYIRKN

SEQ ID NO: 4637 - protein, 27 aa, synthetic construct
  REGION 1..27: note = Synthetic
WVSSCLTIADEVADSLRSGDIGPFHVG

SEQ ID NO: 4638 - protein, 18 aa, synthetic construct
  REGION 1..18: note = Synthetic
ATGFFEELGSKLAGLFTG

SEQ ID NO: 4639 - protein, 25 aa, synthetic construct
  REGION 1..25: note = Synthetic
NQLLHLAEDLARRLLPAFDTPTGIP

SEQ ID NO: 4640 - protein, 13 aa, synthetic construct
  REGION 1..13: note = Synthetic
GFQEAYRRFYGTT

SEQ ID NO: 4641 - protein, 13 aa, synthetic construct
  REGION 1..13: note = Synthetic
GFQEAYRRFYGTT

SEQ ID NO: 4642 - protein, 13 aa, synthetic construct
  REGION 1..13: note = Synthetic
GFQEAYRRFYGTT

SEQ ID NO: 4643 - protein, 35 aa, synthetic construct
  REGION 1..35: note = Synthetic
KCAKKIARDAHGLTPWYGWKNHCEGRDLSSYVKGC

SEQ ID NO: 4644 - protein, 34 aa, synthetic construct
  REGION 1..34: note = Synthetic
NALKEAIKGVQNAVITINEHLEEVRYEIAALETE

SEQ ID NO: 4645 - protein, 20 aa, synthetic construct
  REGION 1..20: note = Synthetic
RGCQRCCSYAGEAVEVETHA

SEQ ID NO: 4646 - protein, 13 aa, synthetic construct
  REGION 1..13: note = Synthetic
VGSIIGDLIQGAK

SEQ ID NO: 4647 - protein, 15 aa, synthetic construct
  REGION 1..15: note = Synthetic
QCCNAFCDTATRTCV

SEQ ID NO: 4648 - protein, 14 aa, synthetic construct
  REGION 1..14: note = Synthetic
ILGLVSNALGGLLG

SEQ ID NO: 4649 - protein, 29 aa, synthetic construct
  REGION 1..29: note = Synthetic
AQEILQRLEEIAEDPGTCEICAYAACTGC

SEQ ID NO: 4650 - protein, 29 aa, synthetic construct
  REGION 1..29: note = Synthetic
AQEILQRLEEIAEDPGTCEICAYAACTGC

SEQ ID NO: 4651 - protein, 31 aa, synthetic construct
  REGION 1..31: note = Synthetic
GKRYIRGCADTCPVRKPREIVECCSTDKCNH

SEQ ID NO: 4652 - protein, 31 aa, synthetic construct; identical to SEQ ID NO: 4651
  REGION 1..31: note = Synthetic

SEQ ID NO: 4653 - protein, 42 aa, synthetic construct
  REGION 1..42: note = Synthetic
GKASGFLGTLCEKILSFGVDELVKLIENHVDPVVVCEKIHAC

SEQ ID NO: 4654 - protein, 19 aa, synthetic construct
  REGION 1..19: note = Synthetic
KQMEAIIKKLTDQTMAIEN

SEQ ID NO: 4655 - protein, 36 aa, synthetic construct
  REGION 1..36: note = Synthetic
ATLPNYCRAGGNGPKDFVCQGVADAYITLVTLPKSS

SEQ ID NO: 4656 - protein, 30 aa, synthetic construct
  REGION 1..30: note = Synthetic
KFVSDVADYFWEMAKISGKVVGNGIASQNE

SEQ ID NO: 4657 - protein, 27 aa, synthetic construct
  REGION 1..27: note = Synthetic
VLEYVVHFLSSLWDTKEEHRHENQTSY

SEQ ID NO: 4658 - protein, 37 aa, synthetic construct
  REGION 1..37: note = Synthetic
HDAHTCLSALPERNSTNYFVQPCCCLRLLGLTGLLSK

SEQ ID NO: 4659 - protein, 17 aa, synthetic construct
  REGION 1..17: note = Synthetic
TVLDLCYSIFNNMHKNE

SEQ ID NO: 4660 - protein, 29 aa, synthetic construct
  REGION 1..29: note = Synthetic
QFVEIINNVINDAINNREIDESLPQYSET

SEQ ID NO: 4661 - protein, 38 aa, synthetic construct
  REGION 1..38: note = Synthetic
VGKRGLRNLDDLDDLDLDHLFDSDVSDADLRLLKQMFR

SEQ ID NO: 4662 - protein, 13 aa, synthetic construct
  REGION 1..13: note = Synthetic
QYSRLGENWARNK

SEQ ID NO: 4663 - protein, 34 aa, synthetic construct; identical to SEQ ID NO: 4601
  REGION 1..34: note = Synthetic

SEQ ID NO: 4664 - protein, 22 aa, synthetic construct
  REGION 1..22: note = Synthetic
CRSGGAGAGSMICLCDYCSDKP

SEQ ID NO: 4665 - protein, 32 aa, synthetic construct
  REGION 1..32: note = Synthetic
LEDFQNAVRAGGLNPDNIFIPKQSETCPLGSN

SEQ ID NO: 4666 - protein, 24 aa, synthetic construct
  REGION 1..24: note = Synthetic
FFKSCVELLNKGYDEKDENVKPEW

SEQ ID NO: 4667 - protein, 39 aa, synthetic construct
  REGION 1..39: note = Synthetic
LKGLPTCGETCFGGTCNTPGCTCDPWPICTRDGLPSAAA

SEQ ID NO: 4668 - protein, 13 aa, synthetic construct
  REGION 1..13: note = Synthetic
IYEWLQGGLDWAE

SEQ ID NO: 4669 - protein, 34 aa, synthetic construct
  REGION 1..34: note = Synthetic
NVKEVLENGGTTLSKKTILLLVTPFLAAAWSRHP

SEQ ID NO: 4670 - protein, 42 aa, synthetic construct
  REGION 1..42: note = Synthetic
CKGGNNACAAAVCDCDRLAAICFAGAPYNDNNYNIDLKARCQ

SEQ ID NO: 4671 - protein, 42 aa, synthetic construct; identical to SEQ ID NO: 4670
  REGION 1..42: note = Synthetic

SEQ ID NO: 4672 - protein, 22 aa, synthetic construct
  REGION 1..22: note = Synthetic
CKSCGTSCAGSCTSCSCGSCSH

SEQ ID NO: 4673 - protein, 21 aa, synthetic construct
  REGION 1..21: note = Synthetic
LYTAFGQPAQQLRDPFEEHGD

SEQ ID NO: 4674 - protein, 14 aa, synthetic construct
  REGION 1..14: note = Synthetic
VEIASEGFKRAIES

SEQ ID NO: 4675 - protein, 13 aa, synthetic construct
  REGION 1..13: note = Synthetic
GQDLSSYVAGCGV

SEQ ID NO: 4676 - protein, 29 aa, synthetic construct
  REGION 1..29: note = Synthetic
ASSCFNNVNDVLRQDVEVVEYLNDLMDTF

SEQ ID NO: 4677 - protein, 29 aa, synthetic construct
  REGION 1..29: note = Synthetic
ASSCFNNVNDVLRQDVEVVEYLNDLMDTF

SEQ ID NO: 4678 - protein, 36 aa, synthetic construct
  REGION 1..36: note = Synthetic
ECDRVAATCFRDNKDTYDMKYWLYGAKNCQEESEPC

SEQ ID NO: 4679 - protein, 22 aa, synthetic construct
  REGION 1..22: note = Synthetic
EGWEKCASYYTVVADCCRRPRS

SEQ ID NO: 4680 - protein, 37 aa, synthetic construct
  REGION 1..37: note = Synthetic
IAAVVDVIRELGICPDDAAVIPIKNNRFYTIEILKVE

SEQ ID NO: 4681 - protein, 26 aa, synthetic construct
  REGION 1..26: note = Synthetic
RQYAAQLPSMCRVEPQQCSIFAAGQY

SEQ ID NO: 4682 - protein, 15 aa, synthetic construct
  REGION 1..15: note = Synthetic
EQVADDVKELASDVI

SEQ ID NO: 4683 - protein, 34 aa, synthetic construct
  REGION 1..34: note = Synthetic
KDLCNGVAGAGHSPWALAGGLLLSLGPALLWAGP

SEQ ID NO: 4684 - protein, 42 aa, synthetic construct
  REGION 1..42: note = Synthetic
SPGSRVFKSGDDRITLSRGTNYFICSVPGHCQGGLKIAVTAA

SEQ ID NO: 4685 - protein, 15 aa, synthetic construct
  REGION 1..15: note = Synthetic
DGLRGLTQGIQDQQY

SEQ ID NO: 4686 - protein, 27 aa, synthetic construct
  REGION 1..27: note = Synthetic
WVSSCLTVADELASSLRTGDIGPFHVG

SEQ ID NO: 4687 - protein, 26 aa, synthetic construct
  REGION 1..26: note = Synthetic
DPFEKAANHMREALKFENLKGREVKS

SEQ ID NO: 4688 - protein, 34 aa, synthetic construct
  REGION 1..34: note = Synthetic
GWMDGWMDGWMDGWMDGWMDGWMGGLGRSEGIRD

SEQ ID NO: 4689 - protein, 41 aa, synthetic construct
  REGION 1..41: note = Synthetic
GICDTYLECGGLACSDYRRACCVNGKCVCRKQGQTLPDCPN

SEQ ID NO: 4690 - protein, 14 aa, synthetic construct
  REGION 1..14: note = Synthetic
VEIASEGFKRAIES

SEQ ID NO: 4691 - protein, 33 aa, synthetic construct
  REGION 1..33: note = Synthetic
ELLDKFQQFAKEQGLTDDNILILPQTDSCMSEV

SEQ ID NO: 4692 - protein, 16 aa, synthetic construct
  REGION 1..16: note = Synthetic
VLELVRGLGRGALRAV

SEQ ID NO: 4693 - protein, 31 aa, synthetic construct; identical to SEQ ID NO: 4522
  REGION 1..31: note = Synthetic

SEQ ID NO: 4694 - protein, 40 aa, synthetic construct
  REGION 1..40: note = Synthetic
DKAIRTIMEFLAFLHLKEAGALGRLPGLPSAASSEDAGQS

SEQ ID NO: 4695 - protein, 14 aa, synthetic construct
  REGION 1..14: note = Synthetic
LLGFVGSLLGGLGI

SEQ ID NO: 4696 - protein, 29 aa, synthetic construct
  REGION 1..29: note = Synthetic
ASSCFNNVNDILRQDVEVVEYLNDLMDTF

SEQ ID NO: 4697 - protein, 27 aa, synthetic construct
  REGION 1..27: note = Synthetic
YLKSLYGGYGNGNGEFWEEYIDERYDN

SEQ ID NO: 4698 - protein, 35 aa, synthetic construct
  REGION 1..35: note = Synthetic
DLVTKFLNNAFTAAQAAQTSKGTLESLQYYFIVRI

SEQ ID NO: 4699 - protein, 35 aa, synthetic construct; identical to SEQ ID NO: 4698
  REGION 1..35: note = Synthetic

SEQ ID NO: 4700 - protein, 27 aa, synthetic construct
  REGION 1..27: note = Synthetic
EDIPECVKQWISTLSLHECSDVTNSCL

SEQ ID NO: 4701 - protein, 27 aa, synthetic construct
  REGION 1..27: note = Synthetic
EDIPECVKQWISTLSLHECSDVTNSCL

SEQ ID NO: 4702 - protein, 14 aa, synthetic construct
  REGION 1..14: note = Synthetic
GAVKSLLGVLTMFG

SEQ ID NO: 4703 - protein, 38 aa, synthetic construct
  REGION 1..38: note = Synthetic
HSGSQVGKALLGIQSANRTDGPGRKRRSFDLYALVNAK

SEQ ID NO: 4704 - protein, 34 aa, synthetic construct
  REGION 1..34: note = Synthetic
SGYCQWAGKYGNACWCYALPDNVPIRVPGKCHRK

SEQ ID NO: 4705 - protein, 14 aa, synthetic construct
  REGION 1..14: note = Synthetic
LLGMVGSLLGGLGL

SEQ ID NO: 4706 - protein, 24 aa, synthetic construct
  REGION 1..24: note = Synthetic
ARGCGTSCPGGIRPVCCRTDLSNK

SEQ ID NO: 4707 - protein, 25 aa, synthetic construct
  REGION 1..25: note = Synthetic
KRAASEVSEFFRNAIDADFNHFDPG

SEQ ID NO: 4708 - protein, 35 aa, synthetic construct
  REGION 1..35: note = Synthetic
GTEIIENAVEFILRSMSRSTGFMEFDDNEGKHSSK

SEQ ID NO: 4709 - protein, 24 aa, synthetic construct
  REGION 1..24: note = Synthetic
NCDRVAANCFAKAPYNKRNYNNCK

SEQ ID NO: 4710 - protein, 17 aa, synthetic construct
  REGION 1..17: note = Synthetic
LLSKAGAVLSNGDNVQF

SEQ ID NO: 4711 - protein, 16 aa, synthetic construct
  REGION 1..16: note = Synthetic
GTHIWNEIRGWSHWSG

SEQ ID NO: 4712 - protein, 16 aa, synthetic construct
  REGION 1..16: note = Synthetic
GTHIWNEIRGWSHWSG

SEQ ID NO: 4713 - protein, 26 aa, synthetic construct
  REGION 1..26: note = Synthetic
LGTCYTQGCTCSWPICKRNGLPDVAA

SEQ ID NO: 4714 - protein, 35 aa, synthetic construct
  REGION 1..35: note = Synthetic
QVSEILKQAIQKFNTHSAEPALFKLVEIKEAKRQV

SEQ ID NO: 4715 - protein, 16 aa, synthetic construct
  REGION 1..16: note = Synthetic
AQYSRLGGNWPRNKRS

SEQ ID NO: 4716 - protein, 26 aa, synthetic construct
  REGION 1..26: note = Synthetic
DNAKSALQHLNQRCCQTFYWCCVQGK

SEQ ID NO: 4717 - protein, 26 aa, synthetic construct
  REGION 1..26: note = Synthetic
DNAKSALQHLNQRCCQTFYWCCGQGK

SEQ ID NO: 4718 - protein, 25 aa, synthetic construct
  REGION 1..25: note = Synthetic
QEANAWGRNGGDPNRYRPPGLPSKY

SEQ ID NO: 4719 - protein, 23 aa, synthetic construct
  REGION 1..23: note = Synthetic
HAFEFMQRALQDLKKTAYNLDTR

SEQ ID NO: 4720 - protein, 23 aa, synthetic construct
  REGION 1..23: note = Synthetic
HAFEFMQRALQDLKKTAYNLDTR

SEQ ID NO: 4721 - protein, 23 aa, synthetic construct
  REGION 1..23: note = Synthetic
HAFEFMQRALQDLKKTAYSLDTR

SEQ ID NO: 4722 - protein, 23 aa, synthetic construct
  REGION 1..23: note = Synthetic
HAFEFMQRALQDLKKTAYNLDTR

SEQ ID NO: 4723 - protein, 23 aa, synthetic construct
  REGION 1..23: note = Synthetic
HAFEFMQRALQDLKKTAYNLDTR

SEQ ID NO: 4724 - protein, 23 aa, synthetic construct
  REGION 1..23: note = Synthetic
HAFEFMQRALQDLKKTAYNLDTR

SEQ ID NO: 4725 - protein, 23 aa, synthetic construct
  REGION 1..23: note = Synthetic
HAFEFMQRALQDLKKTAYNLDTR

SEQ ID NO: 4726 - protein, 23 aa, synthetic construct
  REGION 1..23: note = Synthetic
HAFEFMQRALQDLKKTAYNLDTR

SEQ ID NO: 4727 - protein, 23 aa, synthetic construct
  REGION 1..23: note = Synthetic
HAFEFMQRALQDLKKTAYNLDTR

SEQ ID NO: 4728 - protein, 23 aa, synthetic construct
  REGION 1..23: note = Synthetic
HAFEFMQRALQDLKKTAYNLDTR

SEQ ID NO: 4729 - protein, 23 aa, synthetic construct
  REGION 1..23: note = Synthetic
HAFEFMQRALQDLKKTAYNLDTR

SEQ ID NO: 4730 - protein, 23 aa, synthetic construct
  REGION 1..23: note = Synthetic
HAFEFMQRALQDLKKTAYNLDTR

SEQ ID NO: 4731 - protein, 23 aa, synthetic construct
  REGION 1..23: note = Synthetic
HAFEFMQRALQDLKKTAYNLDTR

SEQ ID NO: 4732 - protein, 13 aa, synthetic construct
  REGION 1..13: note = Synthetic
IYEWLQGGLEWAE

SEQ ID NO: 4733 - protein, 35 aa, synthetic construct
  REGION 1..35: note = Synthetic
VARIIKNLISSIVTAIVTAVTTVLATEGLPGNING

SEQ ID NO: 4734 - protein, 23 aa, synthetic construct
  REGION 1..23: note = Synthetic
IETGFHKWENFYCEQQDPFVCEA

SEQ ID NO: 4735 - protein, 32 aa, synthetic construct
  REGION 1..32: note = Synthetic
LEDFQSVVRAGGLNPDNIFIPKQSETCPLGSN

SEQ ID NO: 4736 - protein, 24 aa, synthetic construct
  REGION 1..24: note = Synthetic
ARGCGTSCPGGIRPVCCRTDLCNK

SEQ ID NO: 4737 - protein, 18 aa, synthetic construct
  REGION 1..18: note = Synthetic
MAELRAIYGGGPVEYVQL

SEQ ID NO: 4738 - protein, 12 aa, synthetic construct
  REGION 1..12: note = Synthetic
VLNSADNLVHGL

SEQ ID NO: 4739 - protein, 27 aa, synthetic construct
  REGION 1..27: note = Synthetic
DLINKCGRGGVGGGGLNGIFLSYEGVV

SEQ ID NO: 4740 - protein, 16 aa, synthetic construct
  REGION 1..16: note = Synthetic
EFGRCLQEIISNASES

SEQ ID NO: 4741 - protein, 34 aa, synthetic construct
  REGION 1..34: note = Synthetic
LNSAATLASSLLSELLACQGWCSFMHTWFSIEHS

SEQ ID NO: 4742 - protein, 16 aa, synthetic construct
  REGION 1..16: note = Synthetic
AVDSIRRMASEATEAP

SEQ ID NO: 4743 - protein, 39 aa, synthetic construct
  REGION 1..39: note = Synthetic
GDLERAAASLPAFCNVDIPNGPGGVCYWLGYPRTPRTGH

SEQ ID NO: 4744 - protein, 27 aa, synthetic construct
  REGION 1..27: note = Synthetic
IATFVTDIFQGAKYFRVKMDIKLYECY

SEQ ID NO: 4745 - protein, 27 aa, synthetic construct
  REGION 1..27: note = Synthetic
IATFVTDIFQGAKYFRVKMDIKLYECY

SEQ ID NO: 4746 - protein, 27 aa, synthetic construct
  REGION 1..27: note = Synthetic
IATFVTDIFQGAKYFRVKMDIKLYECY

SEQ ID NO: 4747 - protein, 39 aa, synthetic construct
  REGION 1..39: note = Synthetic
AQEAWAPVQSALQEAAEKTKEAAANLQNSIQSAVQKPAN

SEQ ID NO: 4748 - protein, 17 aa, synthetic construct
  REGION 1..17: note = Synthetic
QWCTAGCNSITSKCDTL

SEQ ID NO: 4749 - protein, 18 aa, synthetic construct
  REGION 1..18: note = Synthetic
KTLVNLWSKLAQRIFLVS

SEQ ID NO: 4750 - protein, 18 aa, synthetic construct
  REGION 1..18: note = Synthetic
AAWGATLDAFFGMVFAKM

SEQ ID NO: 4751 - protein, 18 aa, synthetic construct
  REGION 1..18: note = Synthetic
GAAKGLLEVASCKLSKSC

SEQ ID NO: 4752 - protein, 38 aa, synthetic construct
  REGION 1..38: note = Synthetic
DKARELISRIKQSELSAKMREWFSETFQKVKEKLKIDS

SEQ ID NO: 4753 - protein, 42 aa, synthetic construct
  REGION 1..42: note = Synthetic
CLKNAAAGVSGLNAGNAASIPSKCGVSIPYTISTSTDCSRVN

SEQ ID NO: 4754 - protein, 33 aa, synthetic construct
  REGION 1..33: note = Synthetic
CGSDGKTYANKCHLMTEACWSPTSITLVHEGKC

SEQ ID NO: 4755 - protein, 21 aa, synthetic construct
  REGION 1..21: note = Synthetic
RSFRNGVGSGVKKTSFRRAKQ

SEQ ID NO: 4756 - protein, 36 aa, synthetic construct
  REGION 1..36: note = Synthetic
ECDRVAATCFRDNKDTYDNKYWFYPAKNCQEESEPC

SEQ ID NO: 4757 - protein, 11 aa, synthetic construct
  REGION 1..11: note = Synthetic
NCVRSYCTLFG

SEQ ID NO: 4758 - protein, 28 aa, synthetic construct
  REGION 1..28: note = Synthetic
DVQEAAKEAVEQFNSKPRAKKYFKLIKI

SEQ ID NO: 4759 - protein, 25 aa, synthetic construct
  REGION 1..25: note = Synthetic
WVGSCASGWHKCNDEYNIAYECCKE

SEQ ID NO: 4760 - protein, 25 aa, synthetic construct
  REGION 1..25: note = Synthetic
WVGSCASGWHKCNDEYNIAYECCKE

SEQ ID NO: 4761 - protein, 23 aa, synthetic construct
  REGION 1..23: note = Synthetic
YGGCGGNANNFKTIEECQRTCAG

SEQ ID NO: 4762 - protein, 20 aa, synthetic construct
  REGION 1..20: note = Synthetic
FVASVAAEMQHVYCAASRKC

SEQ ID NO: 4763 - protein, 17 aa, synthetic construct
  REGION 1..17: note = Synthetic
ERLAYEATSVANNVDDH

SEQ ID NO: 4764 - protein, 27 aa, synthetic construct
  REGION 1..27: note = Synthetic
IPEAIARAVAWLEAHPQAPEPVHHSHH

SEQ ID NO: 4765 - protein, 28 aa, synthetic construct
  REGION 1..28: note = Synthetic
NDCEEAAQELFQQIQEAQADLASKGLIL

SEQ ID NO: 4766 - protein, 39 aa, synthetic construct
  REGION 1..39: note = Synthetic
DKAKKAIERIKQSDLPAKTRNWFTETFGKVRDTFKATFS

SEQ ID NO: 4767 - protein, 37 aa, synthetic construct
  REGION 1..37: note = Synthetic
ISVAATCAKKIYKRHKFDAWYGWKNHCQHGLPDISDC

SEQ ID NO: 4768 - protein, 13 aa, synthetic construct
  REGION 1..13: note = Synthetic
IYEWLQGGLEWAE

SEQ ID NO: 4769 - protein, 40 aa, synthetic construct
  REGION 1..40: note = Synthetic
LEKYRAALEAAERAVHPDAPSRPCWPAGGESGWSGEPSPT

SEQ ID NO: 4770 - protein, 15 aa, synthetic construct
  REGION 1..15: note = Synthetic
EVGEAFRTAVSGAEK

SEQ ID NO: 4771 - protein, 38 aa, synthetic construct
  REGION 1..38: note = Synthetic
VHEICGGVFDGGCYCCPKTPALCWADIQFCTTYCQSQT

SEQ ID NO: 4772 - protein, 26 aa, synthetic construct
  REGION 1..26: note = Synthetic
DNVKRILQTLSNKRSCCPTILSCCFV

SEQ ID NO: 4773 - protein, 27 aa, synthetic construct
  REGION 1..27: note = Synthetic
IATFVTDLFQGARYFRVKMDIKLYECY

SEQ ID NO: 4774 - protein, 28 aa, synthetic construct
  REGION 1..28: note = Synthetic
DEMNTILDNLATRDFINWLIQTKITDRK

SEQ ID NO: 4775 - protein, 34 aa, synthetic construct
  REGION 1..34: note = Synthetic
SGYCQWAGRYGNACWCIDLPDKVPIRIPGPCIGR

SEQ ID NO: 4776 - protein, 23 aa, synthetic construct
  REGION 1..23: note = Synthetic
YGGCGGNANNFKTIDECQRTCAG

SEQ ID NO: 4777 - protein, 36 aa, synthetic construct
  REGION 1..36: note = Synthetic
TCINDFVKKGGVAAKPSSCECDDFGEEHLCRCYVPC

SEQ ID NO: 4778 - protein, 40 aa, synthetic construct
  REGION 1..40: note = Synthetic
NNVVRTIIEFLTFLHLKDAGALERLPSLPTAESAEDAERS

SEQ ID NO: 4779 - protein, 27 aa, synthetic construct
  REGION 1..27: note = Synthetic
IATFVTDLFQGAKYFRVKMDIKLYECY

SEQ ID NO: 4780 - protein, 26 aa, synthetic construct
  REGION 1..26: note = Synthetic
NTVIEEASKVCSKMRRLKGLCKSIMK

SEQ ID NO: 4781 - protein, 19 aa, synthetic construct
  REGION 1..19: note = Synthetic
DIEDVANYILTQAEKGWSN

SEQ ID NO: 4782 - protein, 25 aa, synthetic construct
  REGION 1..25: note = Synthetic
LGNLAEELNGYSRKKGGFSFRFGRR

SEQ ID NO: 4783 - protein, 23 aa, synthetic construct
  REGION 1..23: note = Synthetic
VVALISALVTGILALRLGRELYR

SEQ ID NO: 4784 - protein, 12 aa, synthetic construct
  REGION 1..12: note = Synthetic
GGCHELCQCCEG

SEQ ID NO: 4785 - protein, 28 aa, synthetic construct
  REGION 1..28: note = Synthetic
EKADAVYTGLNTRSQETYETLKHEKPPQ

SEQ ID NO: 4786 - protein, 23 aa, synthetic construct
  REGION 1..23: note = Synthetic
QNAWDKVKTIISEMQLQFSPPNL

SEQ ID NO: 4787 - protein, 39 aa, synthetic construct
  REGION 1..39: note = Synthetic
KLAKRCLESGSLCFAGYGHSSCCSGACLDYGGLGVGACR

SEQ ID NO: 4788 - protein, 24 aa, synthetic construct
  REGION 1..24: note = Synthetic
IYGGCYGNANNFKTIDECKRTCAA

SEQ ID NO: 4789 - protein, 40 aa, synthetic construct
  REGION 1..40: note = Synthetic
AGILTMGRRAGAELEPHPCSGRGCPTVTTTALAPRGGSGV

SEQ ID NO: 4790 - protein, 13 aa, synthetic construct
  REGION 1..13: note = Synthetic
VGAAVGGALAFLI

SEQ ID NO: 4791 - protein, 28 aa, synthetic construct
  REGION 1..28: note = Synthetic
QEADHVADKLCSEVSGLCKGVPVSRGEL

SEQ ID NO: 4792 - protein, 40 aa, synthetic construct
  REGION 1..40: note = Synthetic
QKFLNKIYQYYQTFLWPEYLKTVYQYQKTMTPWNHIKRYF

SEQ ID NO: 4793 - protein, 40 aa, synthetic construct
  REGION 1..40: note = Synthetic
GGGGGGGGARRLKGLAKKRAGNGCFGLKLDRIGSMSGLGC

SEQ ID NO: 4794 - protein, 39 aa, synthetic construct
  REGION 1..39: note = Synthetic
DMAKAALTELKSCIDELQPVHKEQLVKLLVQVLDAQEDT

SEQ ID NO: 4795 - protein, 37 aa, synthetic construct
  REGION 1..37: note = Synthetic
LFRAAPSLLNSASAASMLWAELIAMAPSIPSALPPFS

SEQ ID NO: 4796 - protein, 25 aa, synthetic construct
  REGION 1..25: note = Synthetic
DNFYQSCVDLLNKVYEEKDTPPVQE

SEQ ID NO: 4797 - protein, 36 aa, synthetic construct
  REGION 1..36: note = Synthetic
AEQAVKTGCRSVPGDANAPFPDCCPTTLCRGRQWDH

SEQ ID NO: 4798 - protein, 21 aa, synthetic construct
  REGION 1..21: note = Synthetic
GIVEQCCAGVCSLYQLENYCN

SEQ ID NO: 4799 - protein, 32 aa, synthetic construct
  REGION 1..32: note = Synthetic
SDFKSAISDCGRGDYTGCGVASGKIVGILMRQ

SEQ ID NO: 4800 - protein, 29 aa, synthetic construct
  REGION 1..29: note = Synthetic
ASSCFNNVNDVLRQDVEVVEYLNDLMDTF

SEQ ID NO: 4801 - protein, 32 aa, synthetic construct
  REGION 1..32: note = Synthetic
FMDTAKNVAKNVAKNVAVTLLDKLRCKVTGGC

SEQ ID NO: 4802 - protein, 42 aa, synthetic construct
  REGION 1..42: note = Synthetic
YNQIINTFIDDCLFLQTPMLQSPISSKIVLSFFLRNFFPSLF

SEQ ID NO: 4803 - protein, 21 aa, synthetic construct
  REGION 1..21: note = Synthetic
GIVEQCCASVCSLYQLENYCN

SEQ ID NO: 4804 - protein, 26 aa, synthetic construct
  REGION 1..26: note = Synthetic
ASTVVTYVYQLIEDDVKVERIEFKKY

SEQ ID NO: 4805 - protein, 26 aa, synthetic construct
  REGION 1..26: note = Synthetic
ASTVVTYVYQLIEDDVKVERIEFKKY

SEQ ID NO: 4806 - protein, 14 aa, synthetic construct
  REGION 1..14: note = Synthetic
GFQDAYKRIYGTTV

SEQ ID NO: 4807 - protein, 26 aa, synthetic construct
  REGION 1..26: note = Synthetic
DNFYQSCVDLLNKVYEEKDVPVPPEE

SEQ ID NO: 4808 - protein, 24 aa, synthetic construct
  REGION 1..24: note = Synthetic
LYTFCTFVQTCVSMCVCVCVGSCL

SEQ ID NO: 4809 - protein, 41 aa, synthetic construct
  REGION 1..41: note = Synthetic
VNGYIESGVKQVNLCGWNERWRSVPSFVKFMFLTQPNWCYA

SEQ ID NO: 4810 - protein, 30 aa, synthetic construct
  REGION 1..30: note = Synthetic
GKVAEAIVDAAKAAKTIIADTDDAPEHEEL

SEQ ID NO: 4811 - protein, 25 aa, synthetic construct
  REGION 1..25: note = Synthetic
GLLSVLGSVAQHVLPHVVPVIAEHL

SEQ ID NO: 4812 - protein, 37 aa, synthetic construct
  REGION 1..37: note = Synthetic
FKGARDCGEQGQGCYTRPCCPGLHCAAGATGGGSCQP

SEQ ID NO: 4813 - protein, 42 aa, synthetic construct
  REGION 1..42: note = Synthetic
AQYAAELRRYINMLTRPRYGKRDKEGTLDFLECGSPHSAVPR

SEQ ID NO: 4814 - protein, 38 aa, synthetic construct
  REGION 1..38: note = Synthetic
DKARELISRIKQNELSAKMREWFSETFQKVKEKLKIDS

SEQ ID NO: 4815 - protein, 14 aa, synthetic construct
  REGION 1..14: note = Synthetic
VEIASEGVKRAIES

SEQ ID NO: 4816 - protein, 17 aa, synthetic construct
  REGION 1..17: note = Synthetic
GLMKEVKEIASAPPPAQ

SEQ ID NO: 4817 - protein, 17 aa, synthetic construct
  REGION 1..17: note = Synthetic
GAGVFGAAVAAGVAFLF

SEQ ID NO: 4818 - protein, 40 aa, synthetic construct
  REGION 1..40: note = Synthetic
AACDSLVDTVFNTVWTLGCRPFMNSQRAACICAEEEKEEL

SEQ ID NO: 4819 - protein, 32 aa, synthetic construct
  REGION 1..32: note = Synthetic
VTGLLGLLEELASNLPTGPFSPKPDLLGDDGF

SEQ ID NO: 4820 - protein, 42 aa, synthetic construct
  REGION 1..42: note = Synthetic
CYGAAGTCARVVCDCDRTAALCFGNSEYIEGHKNIDTARFCQ

SEQ ID NO: 4821 - protein, 32 aa, synthetic construct
  REGION 1..32: note = Synthetic
VAHVREMFSNVFNSIKTQREQAMAANGSQPTD

SEQ ID NO: 4822 - protein, 25 aa, synthetic construct
  REGION 1..25: note = Synthetic
LYTAFGNPASGLKDPFEGHEDWSDQ

SEQ ID NO: 4823 - protein, 14 aa, synthetic construct
  REGION 1..14: note = Synthetic
HAINAVSTLVHHSG

SEQ ID NO: 4824 - protein, 18 aa, synthetic construct
  REGION 1..18: note = Synthetic
KKIEEMIKYIASPAQASQ

SEQ ID NO: 4825 - protein, 27 aa, synthetic construct
  REGION 1..27: note = Synthetic
ATSIVNSLKTALTHRNNYKQFAITNAF

SEQ ID NO: 4826 - protein, 17 aa, synthetic construct
  REGION 1..17: note = Synthetic
GYNAAYNRYFRERRGAK

SEQ ID NO: 4827 - protein, 33 aa, synthetic construct
  REGION 1..33: note = Synthetic
CGTDGITYANECVLCFENRKRIEPVLIRKGGPC

SEQ ID NO: 4828 - protein, 17 aa, synthetic construct
  REGION 1..17: note = Synthetic
TSILDLLKKVVTKIVCE

SEQ ID NO: 4829 - protein, 37 aa, synthetic construct
  REGION 1..37: note = Synthetic
FKGARDCGGQGEGCYTQPCCPGLRCRGGGTGGGACQL

SEQ ID NO: 4830 - protein, 37 aa, synthetic construct
  REGION 1..37: note = Synthetic
FKGARDCGGQGEGCYTQPCCPGLRCRGGGTGGGVCQL

SEQ ID NO: 4831 - protein, 37 aa, synthetic construct; identical to SEQ ID NO: 4830
  REGION 1..37: note = Synthetic

SEQ ID NO: 4832 - protein, 37 aa, synthetic construct
  REGION 1..37: note = Synthetic
FKGARDCGGQGEGCYTQPCCPGLRCRGGGTGGGSCQP

SEQ ID NO: 4833 - protein, 30 aa, synthetic construct
  REGION 1..30: note = Synthetic
KCIDRCDEFCKTMEYPNGGDCNTGPCCCLW

SEQ ID NO: 4834 - protein, 25 aa, synthetic construct
  REGION 1..25: note = Synthetic
QKAEEWGRSGKNPNHFRPEGLPEKF

SEQ ID NO: 4835 - protein, 18 aa, synthetic construct
  REGION 1..18: note = Synthetic
GQSAGAKCMNGKCKCYPH

SEQ ID NO: 4836 - protein, 36 aa, synthetic construct
  REGION 1..36: note = Synthetic
KEGCRKLLGGCTIDDDCCPHLGCNKKYWHCGWDGTF

SEQ ID NO: 4837 - protein, 31 aa, synthetic construct
  REGION 1..31: note = Synthetic
KVAEKVASVASEAVDAAKTVIADTDEGHGEL

SEQ ID NO: 4838 - protein, 33 aa, synthetic construct
  REGION 1..33: note = Synthetic
CGSDGQTYGNKCAFCKALEKSSGKINLKHRGKC

SEQ ID NO: 4839 - protein, 33 aa, synthetic construct; identical to SEQ ID NO: 4838
  REGION 1..33: note = Synthetic

SEQ ID NO: 4840 - protein, 26 aa, synthetic construct
  REGION 1..26: note = Synthetic
KFFRSCVDHLSGAYDEKDDVEAPPPE

SEQ ID NO: 4841 - protein, 31 aa, synthetic construct
  REGION 1..31: note = Synthetic
VQSFVNDLIKCANYSLITVFSMLFALIYIMI

SEQ ID NO: 4842 - protein, 32 aa, synthetic construct
  REGION 1..32: note = Synthetic
AESVKTAASEAKKVAEAILVDAVDGDQEHMEL

SEQ ID NO: 4843 - protein, 29 aa, synthetic construct
  REGION 1..29: note = Synthetic
AEQVVQGMKEAQERLTGDAFRKKHLEDEL

SEQ ID NO: 4844 - protein, 20 aa, synthetic construct
  REGION 1..20: note = Synthetic
GRRCLAAAASSVAPGGRSGI

SEQ ID NO: 4845 - protein, 36 aa, synthetic construct
  REGION 1..36: note = Synthetic
ECDRVAATCFRDNKDTYDNKYWFFPAKNCQEESEPC

SEQ ID NO: 4846 - protein, 22 aa, synthetic construct
  REGION 1..22: note = Synthetic
LEEYLATIRGYLRHDLAAAETI

SEQ ID NO: 4847 - protein, 14 aa, synthetic construct
  REGION 1..14: note = Synthetic
TLFNQAADILDHVV

SEQ ID NO: 4848 - protein, 37 aa, synthetic construct
  REGION 1..37: note = Synthetic
IAAVVDVIRELGICPDDAAVIPIKNNRFYTIETLEVE

SEQ ID NO: 4849 - protein, 38 aa, synthetic construct; identical to SEQ ID NO: 4613
  REGION 1..38: note = Synthetic

SEQ ID NO: 4850 - protein, 30 aa, synthetic construct
  REGION 1..30: note = Synthetic
EECDEYCEDLNKNCCGLSNGEPVCATACLG

SEQ ID NO: 4851 - protein, 30 aa, synthetic construct
  REGION 1..30: note = Synthetic
GYGQHLGGPYGNSEPSWKVGSTYTYRFPNF

SEQ ID NO: 4852 - protein, 13 aa, synthetic construct
  REGION 1..13: note = Synthetic
EDLDHLAHSMEDS

SEQ ID NO: 4853 - protein, 20 aa, synthetic construct
  REGION 1..20: note = Synthetic
GHGYCNTLDDFSLCLCKYPC

SEQ ID NO: 4854 - protein, 18 aa, synthetic construct
  REGION 1..18: note = Synthetic
RQAESVVTTLAEALKLAG

SEQ ID NO: 4855 - protein, 38 aa, synthetic construct; identical to SEQ ID NO: 4613
  REGION 1..38: note = Synthetic

SEQ ID NO: 4856 - protein, 22 aa, synthetic construct
  REGION 1..22: note = Synthetic
DLLNTAGGLLGNLVGSLSGGER

SEQ ID NO: 4857 - protein, 37 aa, synthetic construct
  REGION 1..37: note = Synthetic
EDVVHTIIDFLSYLKLKEIGALDSLPSSLTSEEISQP

SEQ ID NO: 4858 - protein, 21 aa, synthetic construct
  REGION 1..21: note = Synthetic
VQYALSCFQQAVNGVGNENGN

SEQ ID NO: 4859 - protein, 30 aa, synthetic construct
  REGION 1..30: note = Synthetic
QGAKEALTELKSCIDGLQPTHKADLVELLV

SEQ ID NO: 4860 - protein, 21 aa, synthetic construct
  REGION 1..21: note = Synthetic
GIVEQCCASVCSLYQLEHYCN

SEQ ID NO: 4861 - protein, 21 aa, synthetic construct
  REGION 1..21: note = Synthetic
RSFRNGVGTGMKKTSFRRAKS

SEQ ID NO: 4862 - protein, 38 aa, synthetic construct
  REGION 1..38: note = Synthetic
VSYGHQGCSSLCVPMKFFRPNVTVDFRCCHDSPFCNKF

SEQ ID NO: 4863 - protein, 40 aa, synthetic construct
  REGION 1..40: note = Synthetic
MDEISSGVNACKDIKGTNDCDTAFKVTMCLKEHKAIPGHH

SEQ ID NO: 4864 - protein, 21 aa, synthetic construct
  REGION 1..21: note = Synthetic
RSFRNGVGSGAKKTSFRRAKQ

SEQ ID NO: 4865 - protein, 32 aa, synthetic construct
  REGION 1..32: note = Synthetic
IPEAIARALAYIEAHPPSPSVVERKVVANLLG

SEQ ID NO: 4866 - protein, 17 aa, synthetic construct
  REGION 1..17: note = Synthetic
GYNAAYNRYFRKRRGTK

SEQ ID NO: 4867 - protein, 34 aa, synthetic construct
  REGION 1..34: note = Synthetic
FASVGGKCQEFIYGGCGGNANNFQTQAECEAKCG

SEQ ID NO: 4868 - protein, 21 aa, synthetic construct
  REGION 1..21: note = Synthetic
RMKRMMEEFLYAVNKTEQALT

SEQ ID NO: 4869 - protein, 20 aa, synthetic construct
  REGION 1..20: note = Synthetic
QQAIHKAESFAEYLAKRQAS

SEQ ID NO: 4870 - protein, 42 aa, synthetic construct
  REGION 1..42: note = Synthetic
CKGGNNACAAAVCDCDRLAAICFAGAPYNNNNYNIDLKARCQ

SEQ ID NO: 4871 - protein, 23 aa, synthetic construct
  REGION 1..23: note = Synthetic
GHDLSEWLKGCDMHVKIDPKIHP

SEQ ID NO: 4872 - protein, 34 aa, synthetic construct
  REGION 1..34: note = Synthetic
CATFISCCGRAYEVDALNSVRTSPWLLAPGNNPH

SEQ ID NO: 4873 - protein, 18 aa, synthetic construct
  REGION 1..18: note = Synthetic
CSNFCSTLSDVCQESWSG

SEQ ID NO: 4874 - protein, 18 aa, synthetic construct
  REGION 1..18: note = Synthetic
AEAQGMIGTLTSKRIKQG

SEQ ID NO: 4875 - protein, 29 aa, synthetic construct
  REGION 1..29: note = Synthetic
AEQVVQGMKEAQERLTGDAFREKHFQDEL

SEQ ID NO: 4876 - protein, 25 aa, synthetic construct
  REGION 1..25: note = Synthetic
WVGSCETGWHKCNTEHNLFHECCKQ

SEQ ID NO: 4877 - protein, 19 aa, synthetic construct
  REGION 1..19: note = Synthetic
TAFGPVSKGLRDPFEEHEE

SEQ ID NO: 4878 - protein, 25 aa, synthetic construct
  REGION 1..25: note = Synthetic
WVGSCASGWHKCNTEHNIFHECCKE

SEQ ID NO: 4879 - protein, 29 aa, synthetic construct
  REGION 1..29: note = Synthetic
ATEFCREILYLASSLREILLYDSWLISNT

SEQ ID NO: 4880 - protein, 31 aa, synthetic construct
  REGION 1..31: note = Synthetic
HLLRTLLELARTQSQRERAEQNRIIFDSVGK

SEQ ID NO: 4881 - protein, 29 aa, synthetic construct
  REGION 1..29: note = Synthetic
AQEILQRLETIAQDPSTCEICAYAACAGC

SEQ ID NO: 4882 - protein, 39 aa, synthetic construct
  REGION 1..39: note = Synthetic
QPADQAAERMQAEQHPLFDQKRRCCKFPCPDSCRYLCCG

SEQ ID NO: 4883 - protein, 27 aa, synthetic construct
  REGION 1..27: note = Synthetic
STFTRAFQAWVGLVIVIAAADGISSAI

SEQ ID NO: 4884 - protein, 30 aa, synthetic construct
  REGION 1..30: note = Synthetic
ETACRHAKSLGNCRTSQKYRANCAKTCELC

SEQ ID NO: 4885 - protein, 29 aa, synthetic construct
  REGION 1..29: note = Synthetic
SAVYYCARDAQYVVNCHDWTTALMTGLTT

SEQ ID NO: 4886 - protein, 28 aa, synthetic construct
  REGION 1..28: note = Synthetic
ASSIFKTLRTIANDDCELCVNVACTGCL

SEQ ID NO: 4887 - protein, 15 aa, synthetic construct
  REGION 1..15: note = Synthetic
GDTGCAQVLEFSKPI

SEQ ID NO: 4888 - protein, 38 aa, synthetic construct
  REGION 1..38: note = Synthetic
DKVREFFNRVKESDIPAKTRNWFSETLQKVKEKLRIES

SEQ ID NO: 4889 - protein, 38 aa, synthetic construct; identical to SEQ ID NO: 4888
  REGION 1..38: note = Synthetic

SEQ ID NO: 4890 - protein, 38 aa, synthetic construct; identical to SEQ ID NO: 4888
  REGION 1..38: note = Synthetic

SEQ ID NO: 4891 - protein, 27 aa, synthetic construct
  REGION 1..27: note = Synthetic
QCCSTFCNPVTNMCIDWLGIGLSRSVL

SEQ ID NO: 4892 - protein, 27 aa, synthetic construct
  REGION 1..27: note = Synthetic
QCCSTFCNPVTNMCIDWLGIGLSRSVL

SEQ ID NO: 4893 - protein, 22 aa, synthetic construct
  REGION 1..22: note = Synthetic
ATECCEKMCTMEDITTKCCPSR

SEQ ID NO: 4894 - protein, 37 aa, synthetic construct
  REGION 1..37: note = Synthetic
RECTKFLGGCSEDSECCPHLGCKDVLYYCAWDGTFGK

SEQ ID NO: 4895 - protein, 37 aa, synthetic construct; identical to SEQ ID NO: 4894
  REGION 1..37: note = Synthetic

SEQ ID NO: 4896 - protein, 37 aa, synthetic construct; identical to SEQ ID NO: 4894
  REGION 1..37: note = Synthetic

SEQ ID NO: 4897 - protein, 39 aa, synthetic construct
  REGION 1..39: note = Synthetic
DSFVQVYQECCKKEMGLREYCEEIYTELPIRSGLWQPNK

SEQ ID NO: 4898 - protein, 33 aa, synthetic construct
  REGION 1..33: note = Synthetic
EAARCLKKAAYNLEYAVYPDFLCGAEYPTCAYN

SEQ ID NO: 4899 - protein, 14 aa, synthetic construct
  REGION 1..14: note = Synthetic
RGYEIGHGYGQRAY

SEQ ID NO: 4900 - protein, 19 aa, synthetic construct
  REGION 1..19: note = Synthetic
LGKCYTAGCSCSWPVCYRN

SEQ ID NO: 4901 - protein, 25 aa, synthetic construct
  REGION 1..25: note = Synthetic
FYGGCGGNANNFETRDECRQTCGGK

SEQ ID NO: 4902 - protein, 14 aa, synthetic construct
  REGION 1..14: note = Synthetic
LFDAIGNLLGGLGL

SEQ ID NO: 4903 - protein, 20 aa, synthetic construct
  REGION 1..20: note = Synthetic
AAYTCCSNACNLNTKKCVLS

SEQ ID NO: 4904 - protein, 12 aa, synthetic construct
  REGION 1..12: note = Synthetic
GLLDALSGILGL

SEQ ID NO: 4905 - protein, 35 aa, synthetic construct
  REGION 1..35: note = Synthetic
VARCGQKVPDLPSVPEEKQLPPTGKESPGTEPPSH

SEQ ID NO: 4906 - protein, 38 aa, synthetic construct
  REGION 1..38: note = Synthetic
GSEIIENAVDFILRSMSRGSSFMELEGDPGQQPSKVTS

SEQ ID NO: 4907 - protein, 41 aa, synthetic construct
  REGION 1..41: note = Synthetic
MKNFTTYLSTAPVVATGWFIVTAALLIEINRFFPDPLVFSF

SEQ ID NO: 4908 - protein, 26 aa, synthetic construct
  REGION 1..26: note = Synthetic
SVGNWISNLLSPVDTSGVAPPAVNEN

SEQ ID NO: 4909 - protein, 11 aa, synthetic construct
  REGION 1..11: note = Synthetic
QWCDGACDCCS

SEQ ID NO: 4910 - protein, 20 aa, synthetic construct
  REGION 1..20: note = Synthetic
GGGMMRGAGAAGGGAAGPGM

SEQ ID NO: 4911 - protein, 29 aa, synthetic construct
  REGION 1..29: note = Synthetic
KYAMKAWDNMMNIITPRPIAACTAQKVNT

SEQ ID NO: 4912 - protein, 40 aa, synthetic construct
  REGION 1..40: note = Synthetic
YPTGCTTCCTGYKGCYYFGTNGKFVCEGESDEPKPYMSTA

SEQ ID NO: 4913 - protein, 30 aa, synthetic construct
  REGION 1..30: note = Synthetic
NELLEEISAAVAGSGPTGAGSGEPSVFGKH

SEQ ID NO: 4914 - protein, 20 aa, synthetic construct
  REGION 1..20: note = Synthetic
VASVAAEMMQHVYCAASRRC

SEQ ID NO: 4915 - protein, 19 aa, synthetic construct
  REGION 1..19: note = Synthetic
ECNQWCTGGCSSVKGNCES

SEQ ID NO: 4916 - protein, 25 aa, synthetic construct
  REGION 1..25: note = Synthetic
RKVLYGLSYCCQHFIHLNINKRESE

SEQ ID NO: 4917 - protein, 31 aa, synthetic construct
  REGION 1..31: note = Synthetic
VDAAGDRFARSVQFLKNLTPGSELFAVEKNE

SEQ ID NO: 4918 - protein, 32 aa, synthetic construct
  REGION 1..32: note = Synthetic
DELINIIDGVLRDDDKNNDGYIDYAEFAKSLQ

SEQ ID NO: 4919 - protein, 32 aa, synthetic construct; identical to SEQ ID NO: 4918
  REGION 1..32: note = Synthetic

SEQ ID NO: 4920 - protein, 18 aa, synthetic construct
  REGION 1..18: note = Synthetic
VQGCKEALDELGLFPLEF

SEQ ID NO: 4921 - protein, 30 aa, synthetic construct
  REGION 1..30: note = Synthetic
CATYGQKCRTWSPPNCCWNLRCKAFRCRPR

SEQ ID NO: 4922 - protein, 11 aa, synthetic construct
  REGION 1..11: note = Synthetic
YTAVADCCHQA

SEQ ID NO: 4923 - protein, 33 aa, synthetic construct
  REGION 1..33: note = Synthetic
VEDVVDDAGDVVEDAVDGTPAENVVDDGPFDLD

SEQ ID NO: 4924 - protein, 30 aa, synthetic construct
  REGION 1..30: note = Synthetic
HVREMFSNVFNSIKTQREQAMAANGSQPTD

SEQ ID NO: 4925 - protein, 25 aa, synthetic construct
  REGION 1..25: note = Synthetic
TGYALYTAFGKPSKELRDPFEEHED

SEQ ID NO: 4926 - protein, 31 aa, synthetic construct
  REGION 1..31: note = Synthetic
MKYMGSFLRKAATTNLFNSIKKRKVQNRAMS

SEQ ID NO: 4927 - protein, 22 aa, synthetic construct
  REGION 1..22: note = Synthetic
FDSGRECCGSFACRFGCVPCCV

SEQ ID NO: 4928 - protein, 33 aa, synthetic construct
  REGION 1..33: note = Synthetic
NVAEKIASKVAEAADVVKTIVADTDDGQEHNEL

SEQ ID NO: 4929 - protein, 31 aa, synthetic construct
  REGION 1..31: note = Synthetic
WSGFVKRLTNYLATTGHGTNTGGPVLTRRFG

SEQ ID NO: 4930 - protein, 28 aa, synthetic construct
  REGION 1..28: note = Synthetic
AFAIFSRLAQNFAPRAIFSLLPYHSVSC

SEQ ID NO: 4931 - protein, 34 aa, synthetic construct
  REGION 1..34: note = Synthetic
VDSMCRSVMRVCDEESISDKTLGDEEVRAKGKEL

SEQ ID NO: 4932 - protein, 19 aa, synthetic construct
  REGION 1..19: note = Synthetic
ECSQWCTAGCNSITSKCDT

SEQ ID NO: 4933 - protein, 21 aa, synthetic construct
  REGION 1..21: note = Synthetic
ACYVASTCCSNACNLNSNKCV

SEQ ID NO: 4934 - protein, 23 aa, synthetic construct
  REGION 1..23: note = Synthetic
LNTAGGLLGDLLGSLGSLSGGES

SEQ ID NO: 4935 - protein, 25 aa, synthetic construct
  REGION 1..25: note = Synthetic
FYGGCGGNANNFETRDECRQTCGGK

SEQ ID NO: 4936 - protein, 25 aa, synthetic construct
  REGION 1..25: note = Synthetic
FYGGCGGNANNFETRDECRQTCGGK

SEQ ID NO: 4937 - protein, 34 aa, synthetic construct
  REGION 1..34: note = Synthetic
QKGKDGCDTAYETVKCYIAVNGKFIWEEIIVLLG

SEQ ID NO: 4938 - protein, 31 aa, synthetic construct
  REGION 1..31: note = Synthetic
FGRMESLLTSLRGSAESPAALGEASAAHPLE

SEQ ID NO: 4939 - protein, 30 aa, synthetic construct
  REGION 1..30: note = Synthetic
EKVASAVSEAAEAAKTFIADTDDVDGHEEL

SEQ ID NO: 4940 - protein, 23 aa, synthetic construct
  REGION 1..23: note = Synthetic
NELLEELSAAGGASAEPNVFGKH

SEQ ID NO: 4941 - protein, 23 aa, synthetic construct
  REGION 1..23: note = Synthetic
NELLEELSAAGGASAEPNVFGKH

SEQ ID NO: 4942 - protein, 23 aa, synthetic construct
  REGION 1..23: note = Synthetic
NELLEELSAAGGASAEPNVFGKH

SEQ ID NO: 4943 - protein, 34 aa, synthetic construct
  REGION 1..34: note = Synthetic
GGECERMADTCCPGLQCLGCNPFNKENLGKCKCQ

SEQ ID NO: 4944 - protein, 30 aa, synthetic construct; identical to SEQ ID NO: 4939
  REGION 1..30: note = Synthetic

SEQ ID NO: 4945 - protein, 18 aa, synthetic construct
  REGION 1..18: note = Synthetic
MKCCRNGCGKMACTTPKF

SEQ ID NO: 4946 - protein, 17 aa, synthetic construct
  REGION 1..17: note = Synthetic
ITECCQLMSGCAVEIKS

SEQ ID NO: 4947 - protein, 26 aa, synthetic construct
  REGION 1..26: note = Synthetic
LSHLLARIWKPYKKRETPDCFWKYCV

SEQ ID NO: 4948 - protein, 12 aa, synthetic construct
  REGION 1..12: note = Synthetic
YEEVASSLCGLK

SEQ ID NO: 4949 - protein, 12 aa, synthetic construct
  REGION 1..12: note = Synthetic
YEEVASSLCGLK

SEQ ID NO: 4950 - protein, 12 aa, synthetic construct
  REGION 1..12: note = Synthetic
YEEVASSLCGLK

SEQ ID NO: 4951 - protein, 14 aa, synthetic construct
  REGION 1..14: note = Synthetic
AVYTPVASCCRKKK

SEQ ID NO: 4952 - protein, 32 aa, synthetic construct
  REGION 1..32: note = Synthetic
DEIANVVDSVLKDMDLDGDGFIDYTEYATKML

SEQ ID NO: 4953 - protein, 32 aa, synthetic construct; identical to SEQ ID NO: 4952
  REGION 1..32: note = Synthetic

SEQ ID NO: 4954 - protein, 29 aa, synthetic construct
  REGION 1..29: note = Synthetic
AEQVVQGMKEAQERLTGDAFREKHLEDEL

SEQ ID NO: 4955 - protein, 25 aa, synthetic construct
  REGION 1..25: note = Synthetic
SHYYASLCHYLNVVTRQWWEGADMW

SEQ ID NO: 4956 - protein, 35 aa, synthetic construct
  REGION 1..35: note = Synthetic
AFHNAPKLAQTMTCTFEVYNIPWRNFISLEKSSCT

SEQ ID NO: 4957 - protein, 34 aa, synthetic construct
  REGION 1..34: note = Synthetic
SGYCQWAGRYGNACWCIDLPDKVPIRISGSCRGR

SEQ ID NO: 4958 - protein, 16 aa, synthetic construct
  REGION 1..16: note = Synthetic
AGAAGVALAGALAFLI

SEQ ID NO: 4959 - protein, 30 aa, synthetic construct
  REGION 1..30: note = Synthetic
MRELISNAADALEKIRFLSLSDESVLNDEK

SEQ ID NO: 4960 - protein, 24 aa, synthetic construct
  REGION 1..24: note = Synthetic
IYGGCYGNANNFKTIDECKRTCAA

SEQ ID NO: 4961 - protein, 24 aa, synthetic construct
  REGION 1..24: note = Synthetic
IYGGCYGNANNFKTIDECKRTCAA

SEQ ID NO: 4962 - protein, 30 aa, synthetic construct; identical to SEQ ID NO: 4939
  REGION 1..30: note = Synthetic

SEQ ID NO: 4963 - protein, 17 aa, synthetic construct
  REGION 1..17: note = Synthetic
QWCTAGCNSITSKCDTL

SEQ ID NO: 4964 - protein, 13 aa, synthetic construct
  REGION 1..13: note = Synthetic
KGRAIAGTCCKRE

SEQ ID NO: 4965 - protein, 34 aa, synthetic construct
  REGION 1..34: note = Synthetic
VSYFASKIARVLEDRYSEFAKQMADVVDKEGKYY

SEQ ID NO: 4966 - protein, 23 aa, synthetic construct
  REGION 1..23: note = Synthetic
ERILSLVEEILSEVRFARGRFLW

SEQ ID NO: 4967 - protein, 37 aa, synthetic construct
  REGION 1..37: note = Synthetic
EELDKWMNSMNRNADYECLPTLKEEKEPNPSPSDNES

SEQ ID NO: 4968 - protein, 32 aa, synthetic construct
  REGION 1..32: note = Synthetic
SAVNRIGTILESWVRWDLAVLGDAYDSDDVNE

SEQ ID NO: 4969 - protein, 19 aa, synthetic construct
  REGION 1..19: note = Synthetic
HASNAIDRAVRLLYDRSLC

SEQ ID NO: 4970 - protein, 25 aa, synthetic construct
  REGION 1..25: note = Synthetic
IPEAIARAVAWLESHPPAPEHPRHH

SEQ ID NO: 4971 - protein, 25 aa, synthetic construct
  REGION 1..25: note = Synthetic
IPEAIARAVAWLESHPPAPEHPRHH

SEQ ID NO: 4972 - protein, 37 aa, synthetic construct
  REGION 1..37: note = Synthetic
IAAVVDVIRELGICPDDAAVIPIKNNRFYTTETLEVE

SEQ ID NO: 4973 - protein, 27 aa, synthetic construct
  REGION 1..27: note = Synthetic
ADNANRILRTLWNLRGCCEDKTCCFIG

SEQ ID NO: 4974 - protein, 27 aa, synthetic construct
  REGION 1..27: note = Synthetic
ADNANRILRTLWNLRGCCEDKTCCFIG

SEQ ID NO: 4975 - protein, 27 aa, synthetic construct
  REGION 1..27: note = Synthetic
ADNANRILRTLWNLRGCCEDKTCCFIG

SEQ ID NO: 4976 - protein, 12 aa, synthetic construct
  REGION 1..12: note = Synthetic
ENAVEFARELAN

SEQ ID NO: 4977 - protein, 33 aa, synthetic construct
  REGION 1..33: note = Synthetic
SGYCQWGGRYGNACWCIKLPDRVPIRVPGKCHR

SEQ ID NO: 4978 - protein, 37 aa, synthetic construct
  REGION 1..37: note = Synthetic
IAAVVDVIQELGICPDDAAVIPIKNNRFYTTEILKVE

SEQ ID NO: 4979 - protein, 37 aa, synthetic construct
  REGION 1..37: note = Synthetic
AALASFYDNAKRTLQRHWAKSLCCPEDAWCCSHDEGK

SEQ ID NO: 4980 - protein, 29 aa, synthetic construct
  REGION 1..29: note = Synthetic
CTSWLATCTDASQCCTGVCYKRAYCALWE

SEQ ID NO: 4981 - protein, 31 aa, synthetic construct
  REGION 1..31: note = Synthetic
RDAGNVLDHGFQRRRECPPWCPTSHCNAGTC

SEQ ID NO: 4982 - protein, 25 aa, synthetic construct
  REGION 1..25: note = Synthetic
IYGGCGGNGNKFPTQEACMKRCAKA

SEQ ID NO: 4983 - protein, 25 aa, synthetic construct
  REGION 1..25: note = Synthetic
IYGGCGGNGNKFPTQEACMKRCAKA

SEQ ID NO: 4984 - protein, 25 aa, synthetic construct
  REGION 1..25: note = Synthetic
IYGGCGGNGNKFPTQEACMKRCGKA

SEQ ID NO: 4985 - protein, 41 aa, synthetic construct
  REGION 1..41: note = Synthetic
ITQAVACAKKIVSQQGITAWVAWKNKCRNRDLTSYVKGCGV

SEQ ID NO: 4986 - protein, 36 aa, synthetic construct
  REGION 1..36: note = Synthetic
GGYGGYGRGYGGYGRGYGGYGRGMWGRPYGGYGWGK

SEQ ID NO: 4987 - protein, 32 aa, synthetic construct
  REGION 1..32: note = Synthetic
DELISIIDGVLRDDDKNNDGYIDYAEFAKSLQ

SEQ ID NO: 4988 - protein, 22 aa, synthetic construct
  REGION 1..22: note = Synthetic
QLVKEFVDLLTYAARTALMRNG

SEQ ID NO: 4989 - protein, 21 aa, synthetic construct
  REGION 1..21: note = Synthetic
TVLKQFSNCMAELQAKDNTTC

SEQ ID NO: 4990 - protein, 21 aa, synthetic construct
  REGION 1..21: note = Synthetic
SAAAAASSVAAGKKGYKRPSY

SEQ ID NO: 4991 - protein, 27 aa, synthetic construct
  REGION 1..27: note = Synthetic
NIIDSISDVAKQICCEITVQCCVLDEE

SEQ ID NO: 4992 - protein, 35 aa, synthetic construct
  REGION 1..35: note = Synthetic
DLVTKFLNNAFTAAQAAQTSEGTLESLQYYFIVRI

SEQ ID NO: 4993 - protein, 24 aa, synthetic construct
  REGION 1..24: note = Synthetic
LGTLAEELSSYSRRKGGFSFRFGR

SEQ ID NO: 4994 - protein, 24 aa, synthetic construct
  REGION 1..24: note = Synthetic
LGTLAEELSSYSRRKGGFSFRFGR

SEQ ID NO: 4995 - protein, 40 aa, synthetic construct
  REGION 1..40: note = Synthetic
AACDSLADTVFNTVWTLGCRPFMNSQRAACICAEEEKEEL

SEQ ID NO: 4996 - protein, 37 aa, synthetic construct
  REGION 1..37: note = Synthetic
EELDKWMNSMNRNADFECLPTLKEEKESNHNPSDSES

SEQ ID NO: 4997 - protein, 22 aa, synthetic construct
  REGION 1..22: note = Synthetic
EAADELRKMVEEVANGDVGKAN

SEQ ID NO: 4998 - protein, 25 aa, synthetic construct
  REGION 1..25: note = Synthetic
TGYALYTAFGKPSKQLRDPFEEHED

SEQ ID NO: 4999 - protein, 42 aa, synthetic construct; identical to SEQ ID NO: 4670
  REGION 1..42: note = Synthetic

SEQ ID NO: 5000 - protein, 11 aa, synthetic construct
  REGION 1..11: note = Synthetic
QWCDGACDCCS

SEQ ID NO: 5001 - protein, 42 aa, synthetic construct
  REGION 1..42: note = Synthetic
ECFHDCITEGYDDGSCVPGPTTAKCGIITKTTNKICYSFAFE

SEQ ID NO: 5002 - protein, 24 aa, synthetic construct
  REGION 1..24: note = Synthetic
CGAHCLALGRRGGYCNSKSVCVCR

SEQ ID NO: 5003 - protein, 32 aa, synthetic construct
  REGION 1..32: note = Synthetic
KYLTSFGSNFGGILTIDLSFYWALGVALTGSK

SEQ ID NO: 5004 - protein, 23 aa, synthetic construct
  REGION 1..23: note = Synthetic
VVALVSAFVTGILALRLGRELYR

SEQ ID NO: 5005 - protein, 35 aa, synthetic construct
  REGION 1..35: note = Synthetic
THICTCLTDLCNNANVHAFKTEMIIFSLIIVKQFM

SEQ ID NO: 5006 - protein, 34 aa, synthetic construct
  REGION 1..34: note = Synthetic
WHVITDMFKNAFPFINWDFFPKVKGLRSAAPDSQ

SEQ ID NO: 5007 - protein, 29 aa, synthetic construct
  REGION 1..29: note = Synthetic
VKSAISEAAEAVKTALADTDGDGQEHNEL

SEQ ID NO: 5008 - protein, 34 aa, synthetic construct
  REGION 1..34: note = Synthetic
KDLCNGAAGAGHSPWALAGGLLLSLGPALLWAGP

SEQ ID NO: 5009 - protein, 42 aa, synthetic construct; identical to SEQ ID NO: 4870
  REGION 1..42: note = Synthetic

SEQ ID NO: 5010 - protein, 42 aa, synthetic construct; identical to SEQ ID NO: 4870
  REGION 1..42: note = Synthetic

SEQ ID NO: 5011 - protein, 20 aa, synthetic construct
  REGION 1..20: note = Synthetic
EYVDTYYSAVCGRYFCCRSR

SEQ ID NO: 5012 - protein, 21 aa, synthetic construct
  REGION 1..21: note = Synthetic
INGMENLVTNFQYFLPFDVPV

SEQ ID NO: 5013 - protein, 38 aa, synthetic construct
  REGION 1..38: note = Synthetic
RTCQGMGESCSSNYDCCGSLCCAGASLFNGCVMGFVAC

SEQ ID NO: 5014 - protein, 25 aa, synthetic construct
  REGION 1..25: note = Synthetic
NVFGKVIADAIEYNYTQVGMTQTHS

SEQ ID NO: 5015 - protein, 31 aa, synthetic construct
  REGION 1..31: note = Synthetic
RDAGNVLDHGFQRRRDCPPWCPTSHCNAGTC

SEQ ID NO: 5016 - protein, 17 aa, synthetic construct
  REGION 1..17: note = Synthetic
VHHMADELLRNGPDTVI

SEQ ID NO: 5017 - protein, 24 aa, synthetic construct
  REGION 1..24: note = Synthetic
HVAKTLCSEVSDHCKSSVFQHSEL

SEQ ID NO: 5018 - protein, 32 aa, synthetic construct
  REGION 1..32: note = Synthetic
KQAGKLMNEAVEHLEYHATSKDGYEPYERGIN

SEQ ID NO: 5019 - protein, 11 aa, synthetic construct
  REGION 1..11: note = Synthetic
QWCDGACDCCA

SEQ ID NO: 5020 - protein, 35 aa, synthetic construct
  REGION 1..35: note = Synthetic
GTWCHTYANRCQVRITEEELMKQREKILGRKGKDY

SEQ ID NO: 5021 - protein, 40 aa, synthetic construct
  REGION 1..40: note = Synthetic
AECVGDGQRCADWAGPYCCSGYYCSCRSMPYCRCRSDSGK

SEQ ID NO: 5022 - protein, 38 aa, synthetic construct
  REGION 1..38: note = Synthetic
ADCVGDGQRCADWAGPYCCSGYYCSCRSMPYCRCRSDS

SEQ ID NO: 5023 - protein, 38 aa, synthetic construct; identical to SEQ ID NO: 5022
  REGION 1..38: note = Synthetic

SEQ ID NO: 5024 - protein, 19 aa, synthetic construct
  REGION 1..19: note = Synthetic
ILAAAATALTCLLPGLWSG

SEQ ID NO: 5025 - protein, 16 aa, synthetic construct
  REGION 1..16: note = Synthetic
GYPAAYRHYFGRRRNK

SEQ ID NO: 5026 - protein, 27 aa, synthetic construct
  REGION 1..27: note = Synthetic
CAAECLKAYKNGKGTCWQKFCQCVYDC

SEQ ID NO: 5027 - protein, 14 aa, synthetic construct
  REGION 1..14: note = Synthetic
AWVQEYVADLKLKA

SEQ ID NO: 5028 - protein, 39 aa, synthetic construct
  REGION 1..39: note = Synthetic
DKARAAIEHIKQKEIMIKTRNWFSETLNKMKEKLKTTFA

SEQ ID NO: 5029 - protein, 41 aa, synthetic construct
  REGION 1..41: note = Synthetic
MENFQKYLSTAPVLLTIWLTFTAGFIIEINRFFPDLLGLYF

SEQ ID NO: 5030 - protein, 34 aa, synthetic construct
  REGION 1..34: note = Synthetic
YTNANAGLAAGLPGKCGVNIPYKISPSTDCKSIK

SEQ ID NO: 5031 - protein, 39 aa, synthetic construct
  REGION 1..39: note = Synthetic
EDAKAAMTELKSCIDGLQPMHKAELVKLLVQVLGSQDGA

SEQ ID NO: 5032 - protein, 18 aa, synthetic construct
  REGION 1..18: note = Synthetic
FVAVAARVFAHGAATLSQ

SEQ ID NO: 5033 - protein, 13 aa, synthetic construct
  REGION 1..13: note = Synthetic
DWVQDYMNKLELN

SEQ ID NO: 5034 - protein, 15 aa, synthetic construct
  REGION 1..15: note = Synthetic
NEAGKRCEDAIGLLV

SEQ ID NO: 5035 - protein, 17 aa, synthetic construct
  REGION 1..17: note = Synthetic
VIDAARRAAQRMNHCGP

SEQ ID NO: 5036 - protein, 27 aa, synthetic construct
  REGION 1..27: note = Synthetic
NIIDSISDVAKQICCQITVDCCVLDEE

SEQ ID NO: 5037 - protein, 27 aa, synthetic construct
  REGION 1..27: note = Synthetic
KCIEFCSSMGTADGQCNNENLCCCTHE

SEQ ID NO: 5038 - protein, 33 aa, synthetic construct
  REGION 1..33: note = Synthetic
SGYCQWVGKYGNGCWCKELPDNVPIRVPGKCHR

SEQ ID NO: 5039 - protein, 28 aa, synthetic construct
  REGION 1..28: note = Synthetic
DCLRAGFQKGGQCGSPCIPCPVKCCCQK

SEQ ID NO: 5040 - protein, 29 aa, synthetic construct
  REGION 1..29: note = Synthetic
AEEILERLETIAQDPSTCEICAYAACAGC

SEQ ID NO: 5041 - protein, 29 aa, synthetic construct
  REGION 1..29: note = Synthetic
AEEILERLETIAQDPSTCEICAYAACAGC

SEQ ID NO: 5042 - protein, 24 aa, synthetic construct
  REGION 1..24: note = Synthetic
VAETAHEAADKVYEVEEEAKEAVG

SEQ ID NO: 5043 - protein, 33 aa, synthetic construct
  REGION 1..33: note = Synthetic
ILTKVPDAAKSIAQGYIDDLNETLAEVVAYYTS

SEQ ID NO: 5044 - protein, 32 aa, synthetic construct
  REGION 1..32: note = Synthetic
DELVSIIDGVLRDDDKNNDGYIDYAEFAKSLQ

SEQ ID NO: 5045 - protein, 21 aa, synthetic construct
  REGION 1..21: note = Synthetic
FQAFVAVAARVFGHGAATLTP

SEQ ID NO: 5046 - protein, 25 aa, synthetic construct
  REGION 1..25: note = Synthetic
IYGGCGGNGNKFPTQEACMKRCAKA

SEQ ID NO: 5047 - protein, 33 aa, synthetic construct
  REGION 1..33: note = Synthetic
ETIRDIYSKGSAAISTYTGILTDQILTMLQGKQ

SEQ ID NO: 5048 - protein, 29 aa, synthetic construct
  REGION 1..29: note = Synthetic
VVTLLGAAASYFKLNNRRNCFRTHEPENV

SEQ ID NO: 5049 - protein, 23 aa, synthetic construct
  REGION 1..23: note = Synthetic
LNEVLSAFFDVEEPPEKGCIICF

SEQ ID NO: 5050 - protein, 24 aa, synthetic construct
  REGION 1..24: note = Synthetic
LTNFGQRMDAIIPGNCSNIVCSPK

SEQ ID NO: 5051 - protein, 41 aa, synthetic construct
  REGION 1..41: note = Synthetic
GRTLAKELEALREAKSHRPLIALPTQDPATHGGASSKASSD

SEQ ID NO: 5052 - protein, 41 aa, synthetic construct
  REGION 1..41: note = Synthetic
GRTLAKELEALREAKSHRPLIALPTQDPATHGGASSEASSD

SEQ ID NO: 5053 - protein, 42 aa, synthetic construct
  REGION 1..42: note = Synthetic
CKGGNDACAAAVCDCDRLAAICFAGAPYNDNNYNIDLKARCQ

SEQ ID NO: 5054 - protein, 30 aa, synthetic construct
  REGION 1..30: note = Synthetic
WRYIRGCADTCPVGKPYEMIECCSTDKCNR

SEQ ID NO: 5055 - protein, 24 aa, synthetic construct
  REGION 1..24: note = Synthetic
DEIFNSAKELVESAEVSKVHTSQV

SEQ ID NO: 5056 - protein, 17 aa, synthetic construct
  REGION 1..17: note = Synthetic
GYNAAYNRYFRQRPGAK

SEQ ID NO: 5057 - protein, 37 aa, synthetic construct
  REGION 1..37: note = Synthetic
DAAFRKFEALCSARSQQPSTSKPSLIDALCTSALKKE

SEQ ID NO: 5058 - protein, 26 aa, synthetic construct
  REGION 1..26: note = Synthetic
VKFMATVVQTGFVYWVGRVTKDIDVE

SEQ ID NO: 5059 - protein, 16 aa, synthetic construct
  REGION 1..16: note = Synthetic
MNKGGTLFEALVIKKQ

SEQ ID NO: 5060 - protein, 13 aa, synthetic construct
  REGION 1..13: note = Synthetic
GQDLSSYLAGCGL

SEQ ID NO: 5061 - protein, 32 aa, synthetic construct
  REGION 1..32: note = Synthetic
MASGVGGGSEGGPDDVKNSYIRVNGEPEIVYQ

SEQ ID NO: 5062 - protein, 15 aa, synthetic construct
  REGION 1..15: note = Synthetic
QCCDHFCSTATSTCI

SEQ ID NO: 5063 - protein, 23 aa, synthetic construct
  REGION 1..23: note = Synthetic
FTTCFKEAFAEVKPQIPKANLDE

SEQ ID NO: 5064 - protein, 29 aa, synthetic construct
  REGION 1..29: note = Synthetic
VKSAISEAAEAVKTALADSDGDGQEHNEL

SEQ ID NO: 5065 - protein, 29 aa, synthetic construct
  REGION 1..29: note = Synthetic
VKSAISEAAEAVKTALADSDGDGQEHNEL

SEQ ID NO: 5066 - protein, 39 aa, synthetic construct
  REGION 1..39: note = Synthetic
GDDVVSNYFTKGKRGKRLGILVVFSFIKEAILPSRQKIY

SEQ ID NO: 5067 - protein, 14 aa, synthetic construct
  REGION 1..14: note = Synthetic
LLDVVGNLLGGLGL

SEQ ID NO: 5068 - protein, 29 aa, synthetic construct
  REGION 1..29: note = Synthetic
RYDACVNACLEHHPNVRECEEACKNPVPP

SEQ ID NO: 5069 - protein, 42 aa, synthetic construct
  REGION 1..42: note = Synthetic
ESFQEFFGRGHEDTMADQEANRHGRSGKDPNYYRPPGLPAKY

SEQ ID NO: 5070 - protein, 39 aa, synthetic construct
  REGION 1..39: note = Synthetic
LSELNSACDDAWETCAWSRTCCSRNCCRGICVSRYYECP

SEQ ID NO: 5071 - protein, 13 aa, synthetic construct
  REGION 1..13: note = Synthetic
LLGGGGGGGGGLL

SEQ ID NO: 5072 - protein, 21 aa, synthetic construct
  REGION 1..21: note = Synthetic
LQAFVAVAARVFAHGAATLSP

SEQ ID NO: 5073 - protein, 20 aa, synthetic construct
  REGION 1..20: note = Synthetic
VIHIVDKVLEYVEEVVLGGR

SEQ ID NO: 5074 - protein, 41 aa, synthetic construct
  REGION 1..41: note = Synthetic
MNDFQKYLSTAPVLLTLWMTFTAGFIIEVNRFFPDMLGLYF

SEQ ID NO: 5075 - protein, 31 aa, synthetic construct
  REGION 1..31: note = Synthetic
EQLENGGTSLSEKTVLLLVTPFLAAAWSLHP

SEQ ID NO: 5076 - protein, 31 aa, synthetic construct
  REGION 1..31: note = Synthetic
GHCRSWYNDCCDGYYCSCMQPPNCICRNNNG

SEQ ID NO: 5077 - protein, 15 aa, synthetic construct
  REGION 1..15: note = Synthetic
ADTISNGLSAIFCAA

SEQ ID NO: 5078 - protein, 13 aa, synthetic construct
  REGION 1..13: note = Synthetic
VHDVSSYVEGCKL

SEQ ID NO: 5079 - protein, 13 aa, synthetic construct
  REGION 1..13: note = Synthetic
AFGNEYITYIENQ

SEQ ID NO: 5080 - protein, 13 aa, synthetic construct
  REGION 1..13: note = Synthetic
AFGNEYITYIENQ

SEQ ID NO: 5081 - protein, 40 aa, synthetic construct
  REGION 1..40: note = Synthetic
GGYGGYGRGMYGGYGRGMYGGYGRGMYGGYGRGMYGGWGK

SEQ ID NO: 5082 - protein, 34 aa, synthetic construct
  REGION 1..34: note = Synthetic
AATAIFRKLAGERNYTDEMVAMLPRQEECTVDEV

SEQ ID NO: 5083 - protein, 29 aa, synthetic construct
  REGION 1..29: note = Synthetic
RCGGWMAKCADSDDCCETFHCTRFNVCGK

SEQ ID NO: 5084 - protein, 29 aa, synthetic construct
  REGION 1..29: note = Synthetic
RCGGWMAKCADSDDCCETFHCTRFNVCGK

SEQ ID NO: 5085 - protein, 29 aa, synthetic construct
  REGION 1..29: note = Synthetic
RCGGWMAKCADSDDCCETFHCTRFNVCGK

SEQ ID NO: 5086 - protein, 13 aa, synthetic construct
  REGION 1..13: note = Synthetic
LKTAYRRIYGITI

SEQ ID NO: 5087 - protein, 32 aa, synthetic construct
  REGION 1..32: note = Synthetic
NAMESVVEKLESMLNFSVSDSPGGTFFEGTGH

SEQ ID NO: 5088 - protein, 31 aa, synthetic construct
  REGION 1..31: note = Synthetic
DEIPKIVEEILYTATFTVLMAIDDLRLRDAT

SEQ ID NO: 5089 - protein, 34 aa, synthetic construct
  REGION 1..34: note = Synthetic
WHVLTDMFKKALPFINWEFFPKVKGLRSAVPDSQ

SEQ ID NO: 5090 - protein, 26 aa, synthetic construct
  REGION 1..26: note = Synthetic
WSKIKEAAKTAGKMAMGFVNDMVGEQ

SEQ ID NO: 5091 - protein, 22 aa, synthetic construct
  REGION 1..22: note = Synthetic
QDAVSSMNTVVESVRLLGWIEK

SEQ ID NO: 5092 - protein, 34 aa, synthetic construct
  REGION 1..34: note = Synthetic
ANTVLERVEGAQQRWKLQVQEQRKTVFDRHKMLS

SEQ ID NO: 5093 - protein, 34 aa, synthetic construct; identical to SEQ ID NO: 5092
  REGION 1..34: note = Synthetic

SEQ ID NO: 5094 - protein, 33 aa, synthetic construct
  REGION 1..33: note = Synthetic
EALEEFKKLVQHKGLSEEDIFMPLQTGSCVLEH

SEQ ID NO: 5095 - protein, 13 aa, synthetic construct
  REGION 1..13: note = Synthetic
LKTAYKRIYGITI

SEQ ID NO: 5096 - protein, 13 aa, synthetic construct
  REGION 1..13: note = Synthetic
LKTAYKRIYGITI

SEQ ID NO: 5097 - protein, 38 aa, synthetic construct
  REGION 1..38: note = Synthetic
GGYHGGGGSCYHYCHGRCCSAAEAKALEATTAQVKPQN

SEQ ID NO: 5098 - protein, 13 aa, synthetic construct
  REGION 1..13: note = Synthetic
DWVQEYMDDLELN

SEQ ID NO: 5099 - protein, 25 aa, synthetic construct
  REGION 1..25: note = Synthetic
INELHELANQCDPDAHHDHPHCHPH

SEQ ID NO: 5100 - protein, 21 aa, synthetic construct
  REGION 1..21: note = Synthetic
IDIIEKLLNEADLSILIIVIC

SEQ ID NO: 5101 - protein, 23 aa, synthetic construct
  REGION 1..23: note = Synthetic
YSGCGGNANRFKTIEECRRTCVG

SEQ ID NO: 5102 - protein, 42 aa, synthetic construct
  REGION 1..42: note = Synthetic
EAFQEFFGRGHEDTIADQEANRHGRSGKDPNYYRPPGLPDKY

SEQ ID NO: 5103 - protein, 41 aa, synthetic construct
  REGION 1..41: note = Synthetic
MNDLQKYLSTAPVLLTLWMTFTAGFIIEINRFFPDMLGLYF

SEQ ID NO: 5104 - protein, 28 aa, synthetic construct
  REGION 1..28: note = Synthetic
AVKKYLAAVLGKRYRQRYRNKGRRLGYL

SEQ ID NO: 5105 - protein, 17 aa, synthetic construct
  REGION 1..17: note = Synthetic
VIDAARRAAQRMNHCGP

SEQ ID NO: 5106 - protein, 27 aa, synthetic construct
  REGION 1..27: note = Synthetic
SDFTKGFQAWVALVLVIAAADGVASSL

SEQ ID NO: 5107 - protein, 25 aa, synthetic construct
  REGION 1..25: note = Synthetic
SACDIASEFIKCLSRQKECPVFEFP

SEQ ID NO: 5108 - protein, 30 aa, synthetic construct
  REGION 1..30: note = Synthetic
ARCGGWMAKCADSDDCCEAFHCTRFNVCGK

SEQ ID NO: 5109 - protein, 33 aa, synthetic construct
  REGION 1..33: note = Synthetic
KIAETVASAVSEAAEAAETVVADTDDVQGHNEL

SEQ ID NO: 5110 - protein, 14 aa, synthetic construct
  REGION 1..14: note = Synthetic
VSSALDAAATATGN

SEQ ID NO: 5111 - protein, 11 aa, synthetic construct
  REGION 1..11: note = Synthetic
GWCDGGCDCCQ

SEQ ID NO: 5112 - protein, 37 aa, synthetic construct
  REGION 1..37: note = Synthetic
IAAVIDVIQELGICPDDAAVIPIKNNRFYTTEILEVE

SEQ ID NO: 5113 - protein, 31 aa, synthetic construct; identical to SEQ ID NO: 4880
  REGION 1..31: note = Synthetic

SEQ ID NO: 5114 - protein, 31 aa, synthetic construct; identical to SEQ ID NO: 4880
  REGION 1..31: note = Synthetic

SEQ ID NO: 5115 - protein, 42 aa, synthetic construct
  REGION 1..42: note = Synthetic
CTTCCTGYTDCYYFGKDGKFVCEGESIEPKACTLECDSRLHT

SEQ ID NO: 5116 - protein, 37 aa, synthetic construct
  REGION 1..37: note = Synthetic
AEQVTRVITGVPWYSTRLRPAISSALSKDGIYTAIPK

SEQ ID NO: 5117 - protein, 29 aa, synthetic construct
  REGION 1..29: note = Synthetic
RCRSAYEDCCDGYYCNCSQPPYCLCRNNN

SEQ ID NO: 5118 - protein, 30 aa, synthetic construct
  REGION 1..30: note = Synthetic
LSGIMSNLGTVGNMVGGFCCTVYSGCCSEK

SEQ ID NO: 5119 - protein, 22 aa, synthetic construct
  REGION 1..22: note = Synthetic
AEKALDVVEKVASIAAAGATLG

SEQ ID NO: 5120 - protein, 12 aa, synthetic construct
  REGION 1..12: note = Synthetic
NVLGRCGSGLHV

SEQ ID NO: 5121 - protein, 40 aa, synthetic construct
  REGION 1..40: note = Synthetic
TDCVGDGQRCADWAGPYCCSGYYCSCRSMPYCRCRSDSGK

SEQ ID NO: 5122 - protein, 32 aa, synthetic construct
  REGION 1..32: note = Synthetic
LLDTLKNMATNAAKGAGVSVLKALSCKLFKTC

SEQ ID NO: 5123 - protein, 22 aa, synthetic construct
  REGION 1..22: note = Synthetic
GGVSELVAPVGAVVGALAVALM

SEQ ID NO: 5124 - protein, 29 aa, synthetic construct
  REGION 1..29: note = Synthetic
KRGCREGGEFCGTLYEERCCSGWCFFVCV

SEQ ID NO: 5125 - protein, 29 aa, synthetic construct
  REGION 1..29: note = Synthetic
KRGCREGGEFCGTLYEERCCSGWCFFVCV

SEQ ID NO: 5126 - protein, 25 aa, synthetic construct
  REGION 1..25: note = Synthetic
ASVIRGVIETAVFAGKILHKRDDGQ

SEQ ID NO: 5127 - protein, 23 aa, synthetic construct
  REGION 1..23: note = Synthetic
DAFRECLKLFTPRRHTRHLRQKY

SEQ ID NO: 5128 - protein, 21 aa, synthetic construct
  REGION 1..21: note = Synthetic
LQAFVAVAARVFAHGAATLTP

SEQ ID NO: 5129 - protein, 38 aa, synthetic construct
  REGION 1..38: note = Synthetic
LSYGHQGCSQLCIPMKLFNPSVIVEYKCCHDSPLCNKF

SEQ ID NO: 5130 - protein, 42 aa, synthetic construct
  REGION 1..42: note = Synthetic
DAVSAVASVVQDEMKVIDDVQQLEKDKQQLKDDIGFLTGERE

SEQ ID NO: 5131 - protein, 22 aa, synthetic construct
  REGION 1..22: note = Synthetic
GAIGKFMNVLRRSGCPWDPWCG

SEQ ID NO: 5132 - protein, 29 aa, synthetic construct
  REGION 1..29: note = Synthetic
AEEILQRLEAIAQDPNTCEICAYAACTGC

SEQ ID NO: 5133 - protein, 29 aa, synthetic construct
  REGION 1..29: note = Synthetic
AEEILQRLEAIAQDPNTCEICAYAACTGC

SEQ ID NO: 5134 - protein, 29 aa, synthetic construct
  REGION 1..29: note = Synthetic
AEEILQRLEAIAQDPNTCEICAYAACTGC

SEQ ID NO: 5135 - protein, 32 aa, synthetic construct
  REGION 1..32: note = Synthetic
AQVAQQLTAMCGLQLQQPGPCPCNAAAGGVYY

SEQ ID NO: 5136 - protein, 27 aa, synthetic construct
  REGION 1..27: note = Synthetic
KANQACTKGGNPGTCGFQYDLCLCLRN

SEQ ID NO: 5137 - protein, 34 aa, synthetic construct
  REGION 1..34: note = Synthetic
AQKAARLAAAAAALAAKTAADAAAKAAAIAAAAA

SEQ ID NO: 5138 - protein, 30 aa, synthetic construct
  REGION 1..30: note = Synthetic
DDCGKLFSGCDTNADCCEGYVCRLWCKLDW

SEQ ID NO: 5139 - protein, 42 aa, synthetic construct
  REGION 1..42: note = Synthetic
GAQFASYGSAWLMPYSEGRGKRGIVDECCLRPCSVDVLLSYC

SEQ ID NO: 5140 - protein, 12 aa, synthetic construct
  REGION 1..12: note = Synthetic
GLQCCQKYVAVA

SEQ ID NO: 5141 - protein, 15 aa, synthetic construct
  REGION 1..15: note = Synthetic
QCCNEFCSTATRTCI

SEQ ID NO: 5142 - protein, 15 aa, synthetic construct
  REGION 1..15: note = Synthetic
QCCNEFCSTATRTCI

SEQ ID NO: 5143 - protein, 31 aa, synthetic construct
  REGION 1..31: note = Synthetic
GSIPACGESCFKGKCYTPGCSCSKYPLCAKN

SEQ ID NO: 5144 - protein, 34 aa, synthetic construct
  REGION 1..34: note = Synthetic
SGYCQWASKYGNACWCYKLPDDARIMKPGRCNGG

SEQ ID NO: 5145 - protein, 33 aa, synthetic construct
  REGION 1..33: note = Synthetic
DLCNGVAQAGLSPWALAGGLLLSLGPALLWAGP

SEQ ID NO: 5146 - protein, 33 aa, synthetic construct
  REGION 1..33: note = Synthetic
NLAEKVANAASEAAEAAKTFVADSDDMDGHEEL

SEQ ID NO: 5147 - protein, 35 aa, synthetic construct
  REGION 1..35: note = Synthetic
RGYGGYGGYGRGMYGGYGRGMYGGYGRGMYGGWGK

SEQ ID NO: 5148 - protein, 16 aa, synthetic construct
  REGION 1..16: note = Synthetic
WMDFGKRAIEDVDYEY

SEQ ID NO: 5149 - protein, 13 aa, synthetic construct
  REGION 1..13: note = Synthetic
LKSLTSGAQQATT

SEQ ID NO: 5150 - protein, 33 aa, synthetic construct
  REGION 1..33: note = Synthetic
CGSDYITYGNKCKLCTEILRSNGKIQFLHEGHC

SEQ ID NO: 5151 - protein, 13 aa, synthetic construct
  REGION 1..13: note = Synthetic
SWVQEYVDDLELN

SEQ ID NO: 5152 - protein, 28 aa, synthetic construct
  REGION 1..28: note = Synthetic
GDCTGWLDGCTSPAECCTAVCDATCKLW

SEQ ID NO: 5153 - protein, 13 aa, synthetic construct
  REGION 1..13: note = Synthetic
QYSHLGGNWARNK

SEQ ID NO: 5154 - protein, 17 aa, synthetic construct
  REGION 1..17: note = Synthetic
KCCRNGCGKVSCVTPNF

SEQ ID NO: 5155 - protein, 35 aa, synthetic construct
  REGION 1..35: note = Synthetic
GVVAAVVAAVAGAVSSFVAYQRRRLCFREGGSAPV

SEQ ID NO: 5156 - protein, 24 aa, synthetic construct
  REGION 1..24: note = Synthetic
DEMVQRVQDVLQSAALDAIHKREG

SEQ ID NO: 5157 - protein, 30 aa, synthetic construct
  REGION 1..30: note = Synthetic
DDCGGLFSGCDSNADCCEGYVCRLWCKYKL

SEQ ID NO: 5158 - protein, 15 aa, synthetic construct
  REGION 1..15: note = Synthetic
LISAATAVFALLVLT

SEQ ID NO: 5159 - protein, 28 aa, synthetic construct
  REGION 1..28: note = Synthetic
DEMNTVLDNLATRDFINWLLHTKITDSL

SEQ ID NO: 5160 - protein, 35 aa, synthetic construct
  REGION 1..35: note = Synthetic
FKTMFHHAFEYASDASPDYRQLLQDALDKGLSAFK

SEQ ID NO: 5161 - protein, 39 aa, synthetic construct
  REGION 1..39: note = Synthetic
AGELLQQLREISATKIRFARQHQEAEREPRPMYPRRRKT

SEQ ID NO: 5162 - protein, 33 aa, synthetic construct
  REGION 1..33: note = Synthetic
DKAKEAATKAYEAAKKHVATAADKVKDWAASSK

SEQ ID NO: 5163 - protein, 28 aa, synthetic construct
  REGION 1..28: note = Synthetic
AVKKYLAAVLGKRYKQRVKNKGRRVAYL

SEQ ID NO: 5164 - protein, 14 aa, synthetic construct
  REGION 1..14: note = Synthetic
EWVQKYVSDLELSA

SEQ ID NO: 5165 - protein, 14 aa, synthetic construct
  REGION 1..14: note = Synthetic
EWVQKYVSDLELSA

SEQ ID NO: 5166 - protein, 14 aa, synthetic construct
  REGION 1..14: note = Synthetic
EWVQKYVSDLELSA

SEQ ID NO: 5167 - protein, 25 aa, synthetic construct
  REGION 1..25: note = Synthetic
KGFLSGLLNVADSVCCKVDTSCCSN

SEQ ID NO: 5168 - protein, 25 aa, synthetic construct
  REGION 1..25: note = Synthetic
IYGGCGGNANNFETRDQCRHTCGGK

SEQ ID NO: 5169 - protein, 37 aa, synthetic construct
  REGION 1..37: note = Synthetic
KVFTQIKGLVAENLVILEQMEKCEPESFYELPSRPSE

SEQ ID NO: 5170 - protein, 36 aa, synthetic construct
  REGION 1..36: note = Synthetic
VETLCTKIVSYGIDKLIEKILEGGSAKLICGLIHAC

SEQ ID NO: 5171 - protein, 24 aa, synthetic construct
  REGION 1..24: note = Synthetic
LTNFGQRMDAIIPGNCSNIVCSPK

SEQ ID NO: 5172 - protein, 24 aa, synthetic construct
  REGION 1..24: note = Synthetic
LTNFGQRMDAIIPGNCSNIVCSSK

SEQ ID NO: 5173 - protein, 21 aa, synthetic construct
  REGION 1..21: note = Synthetic
YCVHTMIDGVDYVVCDKITVY

SEQ ID NO: 5174 - protein, 15 aa, synthetic construct
  REGION 1..15: note = Synthetic
QCCDDFCSTATSTCV

SEQ ID NO: 5175 - protein, 37 aa, synthetic construct
  REGION 1..37: note = Synthetic
TQLKKLVDTLPQKTRMNIMKLSEIILTSPLCNQDLSV

SEQ ID NO: 5176 - protein, 29 aa, synthetic construct
  REGION 1..29: note = Synthetic
DDCGTLFSGCDTSKDCCEGYVCHLWCKYK

SEQ ID NO: 5177 - protein, 14 aa, synthetic construct
  REGION 1..14: note = Synthetic
VEIASEGVKRAIGS

SEQ ID NO: 5178 - protein, 33 aa, synthetic construct
  REGION 1..33: note = Synthetic
CGTDMNTYGNECTLCMKIREDGSHINIIKDEPC

SEQ ID NO: 5179 - protein, 28 aa, synthetic construct
  REGION 1..28: note = Synthetic
GINGLGAVGSWCLRSRRLPCRCPRLVNT

SEQ ID NO: 5180 - protein, 23 aa, synthetic construct
  REGION 1..23: note = Synthetic
LFYYFVEAATEAASKPLVLWLNG

SEQ ID NO: 5181 - protein, 29 aa, synthetic construct
  REGION 1..29: note = Synthetic
IAQEARSLADRLCSEKSGLCGTPANHTEL

SEQ ID NO: 5182 - protein, 34 aa, synthetic construct
  REGION 1..34: note = Synthetic
DAESIARTVMNEFDENRDGRLSAAEFDKALLGPR

SEQ ID NO: 5183 - protein, 11 aa, synthetic construct
  REGION 1..11: note = Synthetic
EWAQGGLEWAE

SEQ ID NO: 5184 - protein, 37 aa, synthetic construct
  REGION 1..37: note = Synthetic
GGGGGARRLKGLAKKRAGNGCFGLKLDRIGSMSGLGC

SEQ ID NO: 5185 - protein, 28 aa, synthetic construct
  REGION 1..28: note = Synthetic
TEAITVFEKLAEEAHGFAHFIDNSECFP

SEQ ID NO: 5186 - protein, 25 aa, synthetic construct
  REGION 1..25: note = Synthetic
IYGGCGGNGNKFPTEKACMKRCAKA

SEQ ID NO: 5187 - protein, 24 aa, synthetic construct
  REGION 1..24: note = Synthetic
TVVYFLYYIMSPLTSKIWDKILNQ

SEQ ID NO: 5188 - protein, 24 aa, synthetic construct
  REGION 1..24: note = Synthetic
TVVYFLYYIMSPLTSKIWDKILNQ

SEQ ID NO: 5189 - protein, 32 aa, synthetic construct
  REGION 1..32: note = Synthetic
ESLKTAARTAVEQATVITNQVQQSVQQAANAH

SEQ ID NO: 5190 - protein, 21 aa, synthetic construct
  REGION 1..21: note = Synthetic
QSMLTAIDDLLQALNFNSVTV

SEQ ID NO: 5191 - protein, 20 aa, synthetic construct
  REGION 1..20: note = Synthetic
AHNCLNKGDTYDKLHDGECK

SEQ ID NO: 5192 - protein, 39 aa, synthetic construct
  REGION 1..39: note = Synthetic
ATFGDRANGFCDYSTSTSPGGECTCVYHCPPVVPHESHL

SEQ ID NO: 5193 - protein, 23 aa, synthetic construct
  REGION 1..23: note = Synthetic
YSGCGGNANRFRTIDECNRTCVG

SEQ ID NO: 5194 - protein, 27 aa, synthetic construct
  REGION 1..27: note = Synthetic
ADDANRILQTLWNLRGCCEDKTCCFIG

SEQ ID NO: 5195 - protein, 40 aa, synthetic construct
  REGION 1..40: note = Synthetic
AGDGFNIAKQAMDQLTNGQAAGLGRIDANYQQVATSNCGL

SEQ ID NO: 5196 - protein, 23 aa, synthetic construct
  REGION 1..23: note = Synthetic
FYQSCVDQLNGVYEEKDTPPVKE

SEQ ID NO: 5197 - protein, 19 aa, synthetic construct
  REGION 1..19: note = Synthetic
STVIYRLQDVFNHWQICTV

SEQ ID NO: 5198 - protein, 18 aa, synthetic construct
  REGION 1..18: note = Synthetic
GYNAAYNRYFRQRRGAKY

SEQ ID NO: 5199 - protein, 28 aa, synthetic construct
  REGION 1..28: note = Synthetic
DEMNTILDNLAARDFINWLIQTKITDRK

SEQ ID NO: 5200 - protein, 20 aa, synthetic construct
  REGION 1..20: note = Synthetic
ECNQWCTGGCNPTQGKCDTA

SEQ ID NO: 5201 - protein, 26 aa, synthetic construct
  REGION 1..26: note = Synthetic
AEEVADDAAQGVEDVQKSADDVVDEA

SEQ ID NO: 5202 - protein, 30 aa, synthetic construct
  REGION 1..30: note = Synthetic
HNLASPISAWIDPSHYCCCGGGCTDDCVNC

SEQ ID NO: 5203 - protein, 33 aa, synthetic construct
  REGION 1..33: note = Synthetic
AATVAESVLNSVKSMNDEYHATIEEDQVISISS

SEQ ID NO: 5204 - protein, 12 aa, synthetic construct
  REGION 1..12: note = Synthetic
LWTLLQGGVHFM

SEQ ID NO: 5205 - protein, 39 aa, synthetic construct
  REGION 1..39: note = Synthetic
VSKATDCIEAGNYCGPTVMKICCGFCSPYSKICMNYPKN

SEQ ID NO: 5206 - protein, 39 aa, synthetic construct; identical to SEQ ID NO: 5205
  REGION 1..39: note = Synthetic

SEQ ID NO: 5207 - protein, 34 aa, synthetic construct
  REGION 1..34: note = Synthetic
RVAECFKDACNKSGLAPSMELILAEFIMESEADK

SEQ ID NO: 5208 - protein, 39 aa, synthetic construct
  REGION 1..39: note = Synthetic
AGELLQQLRGISAANIRFARRQQEAIRAPRPTPSRRRKR

SEQ ID NO: 5209 - protein, 23 aa, synthetic construct
  REGION 1..23: note = Synthetic
SGVAKKLNSAVDFRALARVLLKQ

SEQ ID NO: 5210 - protein, 32 aa, synthetic construct
  REGION 1..32: note = Synthetic
RQCADLGEECYTRFCCPGLRCKDLQVPTCLLA

SEQ ID NO: 5211 - protein, 39 aa, synthetic construct
  REGION 1..39: note = Synthetic
VSKAADCIEAGNYCGPTVMKLCCGFCSPYSKICMNYPKN

SEQ ID NO: 5212 - protein, 21 aa, synthetic construct
  REGION 1..21: note = Synthetic
SGGSGAAGGVGNLFSGILGGL

SEQ ID NO: 5213 - protein, 40 aa, synthetic construct
  REGION 1..40: note = Synthetic
YGGYGRGYGGYGGYGRGYGGYGRGMYGGYGRPYGGYGWGK

SEQ ID NO: 5214 - protein, 27 aa, synthetic construct
  REGION 1..27: note = Synthetic
ERVWEMCDYIWQNVTIPDVEPSDNWDV

SEQ ID NO: 5215 - protein, 22 aa, synthetic construct
  REGION 1..22: note = Synthetic
NQGSGFCDSIGNTSLCKCQYNC

SEQ ID NO: 5216 - protein, 18 aa, synthetic construct
  REGION 1..18: note = Synthetic
VGSCGSGLKSCCVRNRWA

SEQ ID NO: 5217 - protein, 23 aa, synthetic construct
  REGION 1..23: note = Synthetic
GHCIAKGFKGGYCNDKAVCVCRN

SEQ ID NO: 5218 - protein, 42 aa, synthetic construct
  REGION 1..42: note = Synthetic
CLKSAAGAISGINLGKAAGLPSTCGVNIPYKISPSTDCSKVQ

SEQ ID NO: 5219 - protein, 31 aa, synthetic construct
  REGION 1..31: note = Synthetic
EKIASVASEAAEAVKIAVADTDGGSQEHEEL

SEQ ID NO: 5220 - protein, 30 aa, synthetic construct
  REGION 1..30: note = Synthetic
EAAQRVAKAASKIAEAKQVDAEILKKEVYI

SEQ ID NO: 5221 - protein, 24 aa, synthetic construct
  REGION 1..24: note = Synthetic
IYGGCYGNANNFKTIDECKRTCAA

SEQ ID NO: 5222 - protein, 24 aa, synthetic construct
  REGION 1..24: note = Synthetic
IYGGCYGNANNFKTIDECKRTCAA

SEQ ID NO: 5223 - protein, 41 aa, synthetic construct
  REGION 1..41: note = Synthetic
GGLVATLQSLGAGGSSVITGNIGALMGYATHKYLDSEEDEE

SEQ ID NO: 5224 - protein, 14 aa, synthetic construct
  REGION 1..14: note = Synthetic
DWVQEYITDLELNA

SEQ ID NO: 5225 - protein, 40 aa, synthetic construct; identical to SEQ ID NO: 4912
  REGION 1..40: note = Synthetic

SEQ ID NO: 5226 - protein, 41 aa, synthetic construct
  REGION 1..41: note = Synthetic
AAVTHLSQAISSVVAQVLPSAHIDAWEYCMAYIAAGIGAGL

SEQ ID NO: 5227 - protein, 41 aa, synthetic construct
  REGION 1..41: note = Synthetic
AAEAMGKFKQCFLNQSHRTLKNFGLMMHTVYDSIWCNMKSN

SEQ ID NO: 5228 - protein, 34 aa, synthetic construct
  REGION 1..34: note = Synthetic
SFISSMKTCVSKLSSPSLYVSFYVFALFVVVFIL

SEQ ID NO: 5229 - protein, 36 aa, synthetic construct
  REGION 1..36: note = Synthetic
AEVKGLLGQLEELAWNLPPGPFSPIPDLLGDGDDRF

SEQ ID NO: 5230 - protein, 18 aa, synthetic construct
  REGION 1..18: note = Synthetic
GRHAGAKCMNGKCHCSKI

SEQ ID NO: 5231 - protein, 37 aa, synthetic construct; identical to SEQ ID NO: 5116
  REGION 1..37: note = Synthetic

SEQ ID NO: 5232 - protein, 37 aa, synthetic construct; identical to SEQ ID NO: 5116
  REGION 1..37: note = Synthetic

SEQ ID NO: 5233 - protein, 15 aa, synthetic construct
  REGION 1..15: note = Synthetic
ADTIKNGFSAIFCAG

SEQ ID NO: 5234 - protein, 17 aa, synthetic construct
  REGION 1..17: note = Synthetic
FYSIASEAVYAVENPEH

SEQ ID NO: 5235 - protein, 14 aa, synthetic construct
  REGION 1..14: note = Synthetic
TCVKVLQSAAESRP

SEQ ID NO: 5236 - protein, 26 aa, synthetic construct
  REGION 1..26: note = Synthetic
WVTSCATGWHKCNSENELFHECCKQG

SEQ ID NO: 5237 - protein, 19 aa, synthetic construct
  REGION 1..19: note = Synthetic
TRAVSTLLQFATTVAGLIM

SEQ ID NO: 5238 - protein, 21 aa, synthetic construct
  REGION 1..21: note = Synthetic
LTGIKNAMSYIPSLLMGQEMK

SEQ ID NO: 5239 - protein, 25 aa, synthetic construct
  REGION 1..25: note = Synthetic
TGYAVYTAFGQPSKKLRDPFEEHED

SEQ ID NO: 5240 - protein, 25 aa, synthetic construct
  REGION 1..25: note = Synthetic
TGYTIYTAFGQPSKQLRDPFEEHED

SEQ ID NO: 5241 - protein, 35 aa, synthetic construct
  REGION 1..35: note = Synthetic
NGCDTIIEECKTSMVERCQNQEFESAAGSTTLGPQ

SEQ ID NO: 5242 - protein, 40 aa, synthetic construct
  REGION 1..40: note = Synthetic
SGIITPGGRLIQLPHGVSIILEGPSAALLSNGDFVTYESS

SEQ ID NO: 5243 - protein, 16 aa, synthetic construct
  REGION 1..16: note = Synthetic
IDEGGRGVCAIVPEHV

SEQ ID NO: 5244 - protein, 21 aa, synthetic construct
  REGION 1..21: note = Synthetic
RVKGLLASVAERENGHRTFKK

SEQ ID NO: 5245 - protein, 25 aa, synthetic construct
  REGION 1..25: note = Synthetic
TGYALYTAFGEPSKELRDPFEEHED

SEQ ID NO: 5246 - protein, 29 aa, synthetic construct
  REGION 1..29: note = Synthetic
AEQVVQGMKEAQVRLTGDAFREKHFQDEL

SEQ ID NO: 5247 - protein, 25 aa, synthetic construct
  REGION 1..25: note = Synthetic
TGYAIYTSFGRPSEQLRDPFEDHED

SEQ ID NO: 5248 - protein, 34 aa, synthetic construct
  REGION 1..34: note = Synthetic
KALEDFYRFINRERFVERRIITPRQTEACTSENA

SEQ ID NO: 5249 - protein, 25 aa, synthetic construct
  REGION 1..25: note = Synthetic
TGYAIYTSFGRPSEQLKDPFEDHED

SEQ ID NO: 5250 - protein, 31 aa, synthetic construct
  REGION 1..31: note = Synthetic
SGPGGMKNWVEWKLHCLGRPLSYWMTGCHLG

SEQ ID NO: 5251 - protein, 14 aa, synthetic construct
  REGION 1..14: note = Synthetic
KEFNGGAGGFRAAR

SEQ ID NO: 5252 - protein, 35 aa, synthetic construct
  REGION 1..35: note = Synthetic
ALQSLLDSAQTFAETDNNGASIFNGIRKLRTEHDK

SEQ ID NO: 5253 - protein, 23 aa, synthetic construct
  REGION 1..23: note = Synthetic
LNEVLSAFFDVEEPQEKGCIICF

SEQ ID NO: 5254 - protein, 38 aa, synthetic construct
  REGION 1..38: note = Synthetic
GDLVEGGCEKLLVLSDSNLPPFDKSPLLTQNREPVLLD

SEQ ID NO: 5255 - protein, 30 aa, synthetic construct
  REGION 1..30: note = Synthetic
RGVHGCDSYCKTKNFDYGYCRQEHCCCVNY

SEQ ID NO: 5256 - protein, 27 aa, synthetic construct
  REGION 1..27: note = Synthetic
QMTAAADQCWDDLPCPASHKSVCAMTF

SEQ ID NO: 5257 - protein, 15 aa, synthetic construct
  REGION 1..15: note = Synthetic
ADTIKNGFSAIFCAG

SEQ ID NO: 5258 - protein, 25 aa, synthetic construct
  REGION 1..25: note = Synthetic
CNYASTLINSVITTAVCVFAVFIFL

SEQ ID NO: 5259 - protein, 24 aa, synthetic construct
  REGION 1..24: note = Synthetic
DYFHTLVNNWLANNPYLGTGADRD

SEQ ID NO: 5260 - protein, 32 aa, synthetic construct
  REGION 1..32: note = Synthetic
RGMWGECKDGLTTCLAPSECCSEDCEGSCTMW

SEQ ID NO: 5261 - protein, 29 aa, synthetic construct
  REGION 1..29: note = Synthetic
KAINGAQRLAEKAEDAAAASTDAINSAAF

SEQ ID NO: 5262 - protein, 37 aa, synthetic construct
  REGION 1..37: note = Synthetic
AKAAMTELKSCRDGLQPMHKAELVKLLVQVLGSQDGA

SEQ ID NO: 5263 - protein, 23 aa, synthetic construct
  REGION 1..23: note = Synthetic
IYGYCGSGAAYCGAGNCRCQCRG

SEQ ID NO: 5264 - protein, 28 aa, synthetic construct
  REGION 1..28: note = Synthetic
RDGCSNAGGFCGIHPGLCCSEICLVWCT

SEQ ID NO: 5265 - protein, 27 aa, synthetic construct
  REGION 1..27: note = Synthetic
DSCAEEGEECCSDLRCMTSGAGAICVT

SEQ ID NO: 5266 - protein, 34 aa, synthetic construct
  REGION 1..34: note = Synthetic
TSAMDQLTNGMAVELGRVQATYEEADPSHCASGV

SEQ ID NO: 5267 - protein, 38 aa, synthetic construct
  REGION 1..38: note = Synthetic
KAMQGVFEYYKSVTFVSNCGSHPSTTSKGSPINTQYVF

SEQ ID NO: 5268 - protein, 15 aa, synthetic construct
  REGION 1..15: note = Synthetic
QCCDDFCSTATSTCI

SEQ ID NO: 5269 - protein, 15 aa, synthetic construct
  REGION 1..15: note = Synthetic
QCCDDFCSTATSTCI

SEQ ID NO: 5270 - protein, 34 aa, synthetic construct
  REGION 1..34: note = Synthetic
KDILYYCDSAAQHIGGDELNYYCKQNGAGDSVAW

SEQ ID NO: 5271 - protein, 28 aa, synthetic construct
  REGION 1..28: note = Synthetic
HQADAAAAAATKTANNPTDAKLAGAGSP

SEQ ID NO: 5272 - protein, 41 aa, synthetic construct
  REGION 1..41: note = Synthetic
YETCLQYVDRAWIHYSDSEFCGCTNPEQESAFRDAMDCLQF

SEQ ID NO: 5273 - protein, 42 aa, synthetic construct
  REGION 1..42: note = Synthetic
TFGAGGPRLVNTLGGSSPTTKRVIYIVMILLVLITLAVNLKH

SEQ ID NO: 5274 - protein, 42 aa, synthetic construct; identical to SEQ ID NO: 5273
  REGION 1..42: note = Synthetic

SEQ ID NO: 5275 - protein, 25 aa, synthetic construct
  REGION 1..25: note = Synthetic
TGYALYTAFGQPSRELRDPFEEHED

SEQ ID NO: 5276 - protein, 25 aa, synthetic construct
  REGION 1..25: note = Synthetic
TGYALYTAFGQPSRELRDPFEEHED

SEQ ID NO: 5277 - protein, 24 aa, synthetic construct
  REGION 1..24: note = Synthetic
EAMNLLTYMLHGLSRRKHILRWLE

SEQ ID NO: 5278 - protein, 31 aa, synthetic construct
  REGION 1..31: note = Synthetic
RAFAATLVTAAECNLSSVQAPGVRLVLLADG

SEQ ID NO: 5279 - protein, 39 aa, synthetic construct
  REGION 1..39: note = Synthetic
AGDLLQKLRDISAAKLQFVRLRPELTREAIPAHSRRRKR

SEQ ID NO: 5280 - protein, 25 aa, synthetic construct
  REGION 1..25: note = Synthetic
TGYALYTAFGQPSKQLRDPFEDHED

SEQ ID NO: 5281 - protein, 25 aa, synthetic construct
  REGION 1..25: note = Synthetic
TGYALYTAFGQPSKQLRDPFEDHED

SEQ ID NO: 5282 - protein, 25 aa, synthetic construct
  REGION 1..25: note = Synthetic
TGYALYTAFGQPSKELRDPFEEHED

SEQ ID NO: 5283 - protein, 25 aa, synthetic construct
  REGION 1..25: note = Synthetic
TGYALYTAFGQPSKELRDPFEEHED

SEQ ID NO: 5284 - protein, 25 aa, synthetic construct
  REGION 1..25: note = Synthetic
TGYALYTAFGQPSKELRDPFEEHED

SEQ ID NO: 5285 - protein, 25 aa, synthetic construct
  REGION 1..25: note = Synthetic
TGYALYTAFGQPSKELRDPFEEHED

SEQ ID NO: 5286 - protein, 25 aa, synthetic construct
  REGION 1..25: note = Synthetic
TGYALYTAFGQPSKELRDPFEEHED

SEQ ID NO: 5287 - protein, 25 aa, synthetic construct
  REGION 1..25: note = Synthetic
TGYALYTAFGQPSKELRDPFEEHED

SEQ ID NO: 5288 - protein, 25 aa, synthetic construct
  REGION 1..25: note = Synthetic
TGYALYTAFGQPSKELRDPFEEHED

SEQ ID NO: 5289 - protein, 25 aa, synthetic construct
  REGION 1..25: note = Synthetic
TGYALYTAFGQPSKELRDPFEEHED

SEQ ID NO: 5290 - protein, 25 aa, synthetic construct
  REGION 1..25: note = Synthetic
TGYALYTAFGQPSKELRDPFEEHED

SEQ ID NO: 5291 - protein, 25 aa, synthetic construct
  REGION 1..25: note = Synthetic
TGYALYTAFGQPSKELRDPFEEHED

SEQ ID NO: 5292 - protein, 25 aa, synthetic construct
  REGION 1..25: note = Synthetic
TGYALYTAFGQPSKELRDPFEEHED

SEQ ID NO: 5293 - protein, 41 aa, synthetic construct
  REGION 1..41: note = Synthetic
HWVGGGGTSVSSFKGMFFVRHCIYELVFVCVWESMSNWLQK

SEQ ID NO: 5294 - protein, 27 aa, synthetic construct
  REGION 1..27: note = Synthetic
TGAGSSLAGCIAGPNGLLFTVGAGASV

SEQ ID NO: 5295 - protein, 33 aa, synthetic construct
  REGION 1..33: note = Synthetic
VKRACHTCDDGTECCDSRCSCPWNTCTCIPWGK

SEQ ID NO: 5296 - protein, 39 aa, synthetic construct
  REGION 1..39: note = Synthetic
DLIRAALEDADTKNDPRLLGLVTGACCAVLKFSFCCGKK

SEQ ID NO: 5297 - protein, 42 aa, synthetic construct
  REGION 1..42: note = Synthetic
NVLRALRRLGSSKMMRDSRCFGRRLDRIGSLSGLGCNVLRRH

SEQ ID NO: 5298 - protein, 26 aa, synthetic construct
  REGION 1..26: note = Synthetic
DNAKRILQTLRNTRSCCPEEPCCFWR

SEQ ID NO: 5299 - protein, 37 aa, synthetic construct
  REGION 1..37: note = Synthetic
DRASDGGNAAASDLIALTIKGCCSRPPCALSNPDYCG

SEQ ID NO: 5300 - protein, 27 aa, synthetic construct
  REGION 1..27: note = Synthetic
DNAKRFLQTLRNTRSCCPEEITCCPWG

SEQ ID NO: 5301 - protein, 33 aa, synthetic construct; identical to SEQ ID NO: 5150
  REGION 1..33: note = Synthetic

SEQ ID NO: 5302 - protein, 42 aa, synthetic construct
  REGION 1..42: note = Synthetic
SALGNLEGVMEASLYSTEVVTLTRLQKSLYVMLQQLDLIHGC

SEQ ID NO: 5303 - protein, 16 aa, synthetic construct
  REGION 1..16: note = Synthetic
LLNLLAGLGAMGARRP

SEQ ID NO: 5304 - protein, 33 aa, synthetic construct
  REGION 1..33: note = Synthetic
SGYCQWGGRYGNACWCIKLPDDVPIRVPGKCHR

SEQ ID NO: 5305 - protein, 31 aa, synthetic construct
  REGION 1..31: note = Synthetic
HLLRNMIEMARNENQREQAGLNRKYLDEVGK

SEQ ID NO: 5306 - protein, 29 aa, synthetic construct
  REGION 1..29: note = Synthetic
ADEVQEVADDAGQAVEDAEKSADDVVDEA

SEQ ID NO: 5307 - protein, 33 aa, synthetic construct
  REGION 1..33: note = Synthetic
SGYCQWGGKYGNACWCIKLPDDVPIRVPGKCHR

SEQ ID NO: 5308 - protein, 24 aa, synthetic construct
  REGION 1..24: note = Synthetic
IYGGCYGNANNFKTIDECEPPCAA

SEQ ID NO: 5309 - protein, 25 aa, synthetic construct
  REGION 1..25: note = Synthetic
TGYALYTSFGRPSEGLIDPFDNHED

SEQ ID NO: 5310 - protein, 18 aa, synthetic construct
  REGION 1..18: note = Synthetic
QYGNQYVSQYSAPRSSGY

SEQ ID NO: 5311 - protein, 36 aa, synthetic construct
  REGION 1..36: note = Synthetic
ADQVTRVITGVPWYSSRLKPAISSALSADGIYTIAN

SEQ ID NO: 5312 - protein, 42 aa, synthetic construct
  REGION 1..42: note = Synthetic
CLKSAASSFTDLDLGKAASLPSTCNVNIPYKISPSTDCSKVQ

SEQ ID NO: 5313 - protein, 12 aa, synthetic construct
  REGION 1..12: note = Synthetic
GLLDGLLGTLGL

SEQ ID NO: 5314 - protein, 12 aa, synthetic construct
  REGION 1..12: note = Synthetic
GLLDGLLGTLGL

SEQ ID NO: 5315 - protein, 12 aa, synthetic construct
  REGION 1..12: note = Synthetic
GLLDGLLGTLGL

SEQ ID NO: 5316 - protein, 12 aa, synthetic construct
  REGION 1..12: note = Synthetic
GLLDGLLGTLGL

SEQ ID NO: 5317 - protein, 35 aa, synthetic construct
  REGION 1..35: note = Synthetic
AACHSILTSCRVDTDCCAGLKCGIFDEDALCVPQG

SEQ ID NO: 5318 - protein, 33 aa, synthetic construct
  REGION 1..33: note = Synthetic
RGCGTMWSPCSTEKPCCDNFSCQPAIKWCIWSP

SEQ ID NO: 5319 - protein, 19 aa, synthetic construct
  REGION 1..19: note = Synthetic
EEYQKMLENLREAEVKKNA

SEQ ID NO: 5320 - protein, 36 aa, synthetic construct
  REGION 1..36: note = Synthetic
AEQVTRVITGVPWYSTRLRPAISSALSKDGIYTIAN

SEQ ID NO: 5321 - protein, 20 aa, synthetic construct
  REGION 1..20: note = Synthetic
LAEEAKTLAAALLEEEIMDN

SEQ ID NO: 5322 - protein, 29 aa, synthetic construct
  REGION 1..29: note = Synthetic
TDYSDCIHEAIKTNYCTKPQKSYVVGFSI

SEQ ID NO: 5323 - protein, 29 aa, synthetic construct
  REGION 1..29: note = Synthetic
TDYSDCIHEAIKTNYCTKPQKSYMVGFSI

SEQ ID NO: 5324 - protein, 19 aa, synthetic construct
  REGION 1..19: note = Synthetic
GGSCIGFIDQGYMCVCKVG

SEQ ID NO: 5325 - protein, 33 aa, synthetic construct
  REGION 1..33: note = Synthetic
SGGSALMAKIGAFLGYTVHKQVESRQKESKEKK

SEQ ID NO: 5326 - protein, 41 aa, synthetic construct
  REGION 1..41: note = Synthetic
GGLVATLQSLGAGGSSVVIGNIGALMGYATHKYLDSEEDEE

SEQ ID NO: 5327 - protein, 40 aa, synthetic construct
  REGION 1..40: note = Synthetic
EIVKQLLTRGTLKDADFWKRLEMQGCVCNANAKFCCGEGR

SEQ ID NO: 5328 - protein, 42 aa, synthetic construct
  REGION 1..42: note = Synthetic
NRISTGVSTGISTTMNARVAVLITAAILSAPVTAIALLEARR

SEQ ID NO: 5329 - protein, 37 aa, synthetic construct
  REGION 1..37: note = Synthetic
GRGYGGRGGGWGGRGGGWGRGGGGRGFYGGGRRGWGK

SEQ ID NO: 5330 - protein, 33 aa, synthetic construct
  REGION 1..33: note = Synthetic
TQAQSFLDEVIKCANSSQIVLFSMLVALVFIII

SEQ ID NO: 5331 - protein, 27 aa, synthetic construct
  REGION 1..27: note = Synthetic
CKSWEGAAHGACHVRNGKHMCFCYFNC

SEQ ID NO: 5332 - protein, 12 aa, synthetic construct
  REGION 1..12: note = Synthetic
GLLDGLLGGLGL

SEQ ID NO: 5333 - protein, 12 aa, synthetic construct
  REGION 1..12: note = Synthetic
GLLDGLLGGLGL

SEQ ID NO: 5334 - protein, 18 aa, synthetic construct
  REGION 1..18: note = Synthetic
RCHQFAEGIWQGQCVETS

SEQ ID NO: 5335 - protein, 17 aa, synthetic construct
  REGION 1..17: note = Synthetic
VTEIAQSLATCVNDEQS

SEQ ID NO: 5336 - protein, 33 aa, synthetic construct
  REGION 1..33: note = Synthetic
AERCSNFGSDCIPATHDCCSGECFGFEDMGLCT

SEQ ID NO: 5337 - protein, 40 aa, synthetic construct
  REGION 1..40: note = Synthetic
GYGGGYGGGYGDVGYGGGYSGGYSGGYSGGYGSYGHRRKY

SEQ ID NO: 5338 - protein, 11 aa, synthetic construct
  REGION 1..11: note = Synthetic
GHGGYGGGLGY

SEQ ID NO: 5339 - protein, 24 aa, synthetic construct
  REGION 1..24: note = Synthetic
IYGGCGGNANNFKTLEECESTCAA

SEQ ID NO: 5340 - protein, 39 aa, synthetic construct
  REGION 1..39: note = Synthetic
AGELLQQLRDISAAKSHFARRQQVAVRELRPTHSRRWKR

SEQ ID NO: 5341 - protein, 28 aa, synthetic construct
  REGION 1..28: note = Synthetic
DEMNTVLDSLATRDFINWLLQTKITDRK

SEQ ID NO: 5342 - protein, 31 aa, synthetic construct; identical to SEQ ID NO: 5075
  REGION 1..31: note = Synthetic

SEQ ID NO: 5343 - protein, 23 aa, synthetic construct
  REGION 1..23: note = Synthetic
GFGCYRSCWKAGHDEETCKKECS

SEQ ID NO: 5344 - protein, 12 aa, synthetic construct
  REGION 1..12: note = Synthetic
GAVSGLLTNLGL

SEQ ID NO: 5345 - protein, 40 aa, synthetic construct
  REGION 1..40: note = Synthetic
AGILTMGRRAGAEPAPRPCPGRRCPVVAVPSAAPGGRSGV

SEQ ID NO: 5346 - protein, 40 aa, synthetic construct
  REGION 1..40: note = Synthetic
AGILTMGRRAGAEPAPRPCLGRRCSAPAAASVAPGGQSGI

SEQ ID NO: 5347 - protein, 22 aa, synthetic construct
  REGION 1..22: note = Synthetic
AAVTTYAGIITDQVFSVLSGKD

SEQ ID NO: 5348 - protein, 24 aa, synthetic construct
  REGION 1..24: note = Synthetic
ATSIVNSLKTALTQRNSYKEYAII

SEQ ID NO: 5349 - protein, 37 aa, synthetic construct
  REGION 1..37: note = Synthetic
ADQVTRVITGVPWYSTRLRPAISSALSKDGIYTAVPN

SEQ ID NO: 5350 - protein, 34 aa, synthetic construct
  REGION 1..34: note = Synthetic
RAAAEECEEYCEEEEKTCCGEEDGEPVCAEFCLG

SEQ ID NO: 5351 - protein, 17 aa, synthetic construct
  REGION 1..17: note = Synthetic
KCCRNGCGKVSCVTPVF

SEQ ID NO: 5352 - protein, 32 aa, synthetic construct
  REGION 1..32: note = Synthetic
KAAKAVLDAAPADKFKLMDESFKVAVMQVIAS

SEQ ID NO: 5353 - protein, 13 aa, synthetic construct
  REGION 1..13: note = Synthetic
VGGLVGGLLGRAL

SEQ ID NO: 5354 - protein, 33 aa, synthetic construct
  REGION 1..33: note = Synthetic
VITSLFNYVNSCASSIVGSLTPSLPNCVSTGSI

SEQ ID NO: 5355 - protein, 25 aa, synthetic construct
  REGION 1..25: note = Synthetic
TGYALYTAFGQPSQKLRDPFEEHGD

SEQ ID NO: 5356 - protein, 25 aa, synthetic construct
  REGION 1..25: note = Synthetic
TGYALYTAFGQPSQKLRDPFEEHGD

SEQ ID NO: 5357 - protein, 40 aa, synthetic construct
  REGION 1..40: note = Synthetic
GNGAYASITNGGPGNQNVTIRLKSQRGHGINFVIEIYSRY

SEQ ID NO: 5358 - protein, 13 aa, synthetic construct
  REGION 1..13: note = Synthetic
VGGIVGGLLGRAL

SEQ ID NO: 5359 - protein, 32 aa, synthetic construct
  REGION 1..32: note = Synthetic
RQCADLGEECHTRFCCPGLRCEDLQVPTCLMA

SEQ ID NO: 5360 - protein, 41 aa, synthetic construct
  REGION 1..41: note = Synthetic
QNLKGAMATGSGSNLKLRRSEMPADPYHVTICKIWGEESSS

SEQ ID NO: 5361 - protein, 29 aa, synthetic construct
  REGION 1..29: note = Synthetic
CYTGYNGVGECFDDPNVPGPDNCGCRYNC

SEQ ID NO: 5362 - protein, 34 aa, synthetic construct
  REGION 1..34: note = Synthetic
TMESIVNTVANPEASTVSINTPETTTVPVSSTAA

SEQ ID NO: 5363 - protein, 31 aa, synthetic construct
  REGION 1..31: note = Synthetic
EQLENGGTSLSEKTVVLLVTLLLAAAWCLHP

SEQ ID NO: 5364 - protein, 42 aa, synthetic construct; identical to SEQ ID NO: 5139
  REGION 1..42: note = Synthetic

SEQ ID NO: 5365 - protein, 42 aa, synthetic construct; identical to SEQ ID NO: 5139
  REGION 1..42: note = Synthetic

SEQ ID NO: 5366 - protein, 40 aa, synthetic construct
  REGION 1..40: note = Synthetic
RNGHDYYGDYYQRHYDEDAAIGPHSRESFRHGASVNYNDY

SEQ ID NO: 5367 - protein, 21 aa, synthetic construct
  REGION 1..21: note = Synthetic
LRDYANRVINGGPVEAAGPPA

SEQ ID NO: 5368 - protein, 20 aa, synthetic construct
  REGION 1..20: note = Synthetic
EAAEAYGTCFRGEAKKHGLL

SEQ ID NO: 5369 - protein, 31 aa, synthetic construct; identical to SEQ ID NO: 5305
  REGION 1..31: note = Synthetic

SEQ ID NO: 5370 - protein, 34 aa, synthetic construct
  REGION 1..34: note = Synthetic
TAMAIFRKLARERNYTDEMVAVLPSQEECSVDEV

SEQ ID NO: 5371 - protein, 29 aa, synthetic construct
  REGION 1..29: note = Synthetic
TDYSDCIHEAIKTNDCTKPQKSDVVGVSI

SEQ ID NO: 5372 - protein, 28 aa, synthetic construct
  REGION 1..28: note = Synthetic
TGYALYTAFGQPSQQLRDPFEEHGNELK

SEQ ID NO: 5373 - protein, 28 aa, synthetic construct
  REGION 1..28: note = Synthetic
TGYALYTAFGQPSQQLRDPFEEHGNELK

SEQ ID NO: 5374 - protein, 29 aa, synthetic construct
  REGION 1..29: note = Synthetic
TDYSDCIHEAIKTNYCTKPQKSYVLEFSI

SEQ ID NO: 5375 - protein, 29 aa, synthetic construct
  REGION 1..29: note = Synthetic
TDYSDCIHEAIKTNYCTKPQKSYLVGFSV

SEQ ID NO: 5376 - protein, 32 aa, synthetic construct
  REGION 1..32: note = Synthetic
YGGCGGNANNFHTLEECEKVCGVRSRDSPKEN

SEQ ID NO: 5377 - protein, 36 aa, synthetic construct
  REGION 1..36: note = Synthetic
LASGFGVGSSLCAAHCIARRYRGGYCNSKAVCVCRN

SEQ ID NO: 5378 - protein, 25 aa, synthetic construct
  REGION 1..25: note = Synthetic
GGGYGGGGGYGGGYGGGYGGGKYKG

SEQ ID NO: 5379 - protein, 25 aa, synthetic construct
  REGION 1..25: note = Synthetic
RRAEEWGRSGQDPDHFRPAGLPKKY

SEQ ID NO: 5380 - protein, 15 aa, synthetic construct
  REGION 1..15: note = Synthetic
NALSVLDKIYTSPLC

SEQ ID NO: 5381 - protein, 27 aa, synthetic construct
  REGION 1..27: note = Synthetic
AANIFRALRSISQEDCELCINVACTGC

SEQ ID NO: 5382 - protein, 18 aa, synthetic construct
  REGION 1..18: note = Synthetic
KARTAVDYICSELYDKAW

SEQ ID NO: 5383 - protein, 25 aa, synthetic construct
  REGION 1..25: note = Synthetic
TGYALYTAFGQPSEQLRDPFEEHED

SEQ ID NO: 5384 - protein, 25 aa, synthetic construct
  REGION 1..25: note = Synthetic
TGYALYTAFGQPSEQLRDPFEEHED

SEQ ID NO: 5385 - protein, 25 aa, synthetic construct
  REGION 1..25: note = Synthetic
TGYALYTAFGQPSEQLRDPFEEHED

SEQ ID NO: 5386 - protein, 25 aa, synthetic construct
  REGION 1..25: note = Synthetic
TGYALYTAFGQPSEQLRDPFEEHED

SEQ ID NO: 5387 - protein, 25 aa, synthetic construct
  REGION 1..25: note = Synthetic
TGYALYTAFGQPSEQLRDPFEEHED

SEQ ID NO: 5388 - protein, 25 aa, synthetic construct
  REGION 1..25: note = Synthetic
TGYALYTAFGQPSEQLRDPFEEHED

SEQ ID NO: 5389 - protein, 25 aa, synthetic construct
  REGION 1..25: note = Synthetic
TGYALYTAFGQPSEQLRDPFEEHED

SEQ ID NO: 5390 - protein, 25 aa, synthetic construct
  REGION 1..25: note = Synthetic
TGYALYTAFGQPSEQLRDPFEEHED

SEQ ID NO: 5391 - protein, 25 aa, synthetic construct
  REGION 1..25: note = Synthetic
TGYALYTAFGQPSEQLRDPFEEHED

SEQ ID NO: 5392 - protein, 29 aa, synthetic construct
  REGION 1..29: note = Synthetic
ATSLASSIQSFASSVFLAAFFACSFIYMF

SEQ ID NO: 5393 - protein, 35 aa, synthetic construct
  REGION 1..35: note = Synthetic
RNAAAKASDLIALNARRPECCTHPACHVSNPELCG

SEQ ID NO: 5394 - protein, 13 aa, synthetic construct
  REGION 1..13: note = Synthetic
NGVYDQLGGCGAA

SEQ ID NO: 5395 - protein, 23 aa, synthetic construct
  REGION 1..23: note = Synthetic
MVALFAALFTGILALRLGTELYK

SEQ ID NO: 5396 - protein, 25 aa, synthetic construct
  REGION 1..25: note = Synthetic
KDGQTVLGTLDSKRLSPGGPDPRHH

SEQ ID NO: 5397 - protein, 42 aa, synthetic construct
  REGION 1..42: note = Synthetic
CESVAGRCIHNGCWCERSAPHGNCCNTSGCTARWWCPGTKWD

SEQ ID NO: 5398 - protein, 20 aa, synthetic construct
  REGION 1..20: note = Synthetic
TIIECAQKALTFWTYQNAQE

SEQ ID NO: 5399 - protein, 31 aa, synthetic construct
  REGION 1..31: note = Synthetic
AKSASNAASDAMEDAKDATKSWADWVKDKFD

SEQ ID NO: 5400 - protein, 16 aa, synthetic construct
  REGION 1..16: note = Synthetic
GRSGYAYCSGGGMYCN

SEQ ID NO: 5401 - protein, 27 aa, synthetic construct
  REGION 1..27: note = Synthetic
RKGFGLISQMFKLSCCADPACKHTPGC

SEQ ID NO: 5402 - protein, 31 aa, synthetic construct
  REGION 1..31: note = Synthetic
EQLESGGTSLSEKTVVLLVTPLLAAAWCLHP

SEQ ID NO: 5403 - protein, 20 aa, synthetic construct
  REGION 1..20: note = Synthetic
GNQFTALINALDCSPVNVNL

SEQ ID NO: 5404 - protein, 39 aa, synthetic construct
  REGION 1..39: note = Synthetic
DKARAAIESIKQSDIPAKTRNWFSETFHKVKEQLKTAFS

SEQ ID NO: 5405 - protein, 18 aa, synthetic construct
  REGION 1..18: note = Synthetic
RCIDEGGSGVCAIVPVLN

SEQ ID NO: 5406 - protein, 17 aa, synthetic construct
  REGION 1..17: note = Synthetic
KCCKNGCGFMTCTTARP

SEQ ID NO: 5407 - protein, 41 aa, synthetic construct
  REGION 1..41: note = Synthetic
MKDFTTYLSTAPVVAAAWFTFTAGLLIEINRFFPDPLAFSF

SEQ ID NO: 5408 - protein, 37 aa, synthetic construct
  REGION 1..37: note = Synthetic
ADQVTRVITGVPWYSTRLRPAISSALSADGIYTAVPN

SEQ ID NO: 5409 - protein, 29 aa, synthetic construct
  REGION 1..29: note = Synthetic
DCDRVAANCFAGAPYNNDNFFISFKENCQ

SEQ ID NO: 5410 - protein, 17 aa, synthetic construct
  REGION 1..17: note = Synthetic
GGGYGGGGYGGNGFFGK

SEQ ID NO: 5411 - protein, 32 aa, synthetic construct; identical to SEQ ID NO: 5376
  REGION 1..32: note = Synthetic

SEQ ID NO: 5412 - protein, 40 aa, synthetic construct
  REGION 1..40: note = Synthetic
GLYGGYGGFGGYGYRPFSYGYNPFSYGYYGFGDDDGGFDD

SEQ ID NO: 5413 - protein, 37 aa, synthetic construct
  REGION 1..37: note = Synthetic
GGGGGAQYPDGYSGRLPGGTYLHNKDCVGCSISGGGD

SEQ ID NO: 5414 - protein, 13 aa, synthetic construct
  REGION 1..13: note = Synthetic
TWVQEYVNDLELN

SEQ ID NO: 5415 - protein, 35 aa, synthetic construct
  REGION 1..35: note = Synthetic
TGGSSAAKSGSSSGAGFAPVAGAGSLAAIAGLLLL

SEQ ID NO: 5416 - protein, 41 aa, synthetic construct
  REGION 1..41: note = Synthetic
DAVGFADAVGEADPIDWKKVDWKKVSKKTCKVMLKACKFLG

SEQ ID NO: 5417 - protein, 36 aa, synthetic construct
  REGION 1..36: note = Synthetic
EEAAGLCEEGNEECVERRMLRDAHLDYIYTQKRNRP

SEQ ID NO: 5418 - protein, 41 aa, synthetic construct
  REGION 1..41: note = Synthetic
ITQAVACAKTIVSRQGITAWVAWKNKCRNRDVSSYIRGCKL

SEQ ID NO: 5419 - protein, 21 aa, synthetic construct
  REGION 1..21: note = Synthetic
ATGMCTSIPSLKDCYCMHQCP

SEQ ID NO: 5420 - protein, 35 aa, synthetic construct
  REGION 1..35: note = Synthetic
AVLSAGTRYLQWNDKKCTLLHPFLCQFQPRSEANG

SEQ ID NO: 5421 - protein, 24 aa, synthetic construct
  REGION 1..24: note = Synthetic
IYGGCYGNANNFKTIEECKRTCAA

SEQ ID NO: 5422 - protein, 37 aa, synthetic construct
  REGION 1..37: note = Synthetic
MKYFTTYLSTAPVVAVLWFTLTASLLIEINRFFPDIL

SEQ ID NO: 5423 - protein, 33 aa, synthetic construct
  REGION 1..33: note = Synthetic
CGSDYITYGNECHLCTESLKSNGRVQFLHDGSC

SEQ ID NO: 5424 - protein, 27 aa, synthetic construct
  REGION 1..27: note = Synthetic
IEDMARTFFAHFPLGSTLGFHVPYQED

SEQ ID NO: 5425 - protein, 29 aa, synthetic construct
  REGION 1..29: note = Synthetic
GGCSAGQTCCKHLVCSRRHGWCVWDGTFS

SEQ ID NO: 5426 - protein, 28 aa, synthetic construct
  REGION 1..28: note = Synthetic
GKTVRNIYDAGVIQLAGSFPGEGRDCLH

SEQ ID NO: 5427 - protein, 33 aa, synthetic construct
  REGION 1..33: note = Synthetic
SGYCQWGGKYGNACWCIKLPDSVPIRVPGKCQR

SEQ ID NO: 5428 - protein, 35 aa, synthetic construct
  REGION 1..35: note = Synthetic
RVVTEACEEYCEDRDKKTCCGLENGEPFCATLCFG

SEQ ID NO: 5429 - protein, 33 aa, synthetic construct
  REGION 1..33: note = Synthetic
DDLYAIAAHILTQPQIQAEKWGGGKIYYTKRSM

SEQ ID NO: 5430 - protein, 21 aa, synthetic construct
  REGION 1..21: note = Synthetic
SGSQAAKHLMGLAAANYAGGP

SEQ ID NO: 5431 - protein, 30 aa, synthetic construct
  REGION 1..30: note = Synthetic
SGSQAAKHLMGLAAANYAGGPGRRRRSEQA

SEQ ID NO: 5432 - protein, 21 aa, synthetic construct
  REGION 1..21: note = Synthetic
SGSQAAKHLMGLAAANYAGGP

SEQ ID NO: 5433 - protein, 21 aa, synthetic construct
  REGION 1..21: note = Synthetic
SGSQAAKHLMGLAAANYAGGP

SEQ ID NO: 5434 - protein, 25 aa, synthetic construct
  REGION 1..25: note = Synthetic
TGYALYTAFGQPSEQLRDPFEEHGD

SEQ ID NO: 5435 - protein, 25 aa, synthetic construct
  REGION 1..25: note = Synthetic
TGYALYTAFGQPSEQLRDPFEEHGD

SEQ ID NO: 5436 - protein, 28 aa, synthetic construct
  REGION 1..28: note = Synthetic
DEMNTVLDTLATRDFINWLLQTKITDRK

SEQ ID NO: 5437 - protein, 42 aa, synthetic construct
  REGION 1..42: note = Synthetic
LKSGFSCCHRYGGIGYVEGYKTVDPVTCQHESYRLDDPSQRS

SEQ ID NO: 5438 - protein, 39 aa, synthetic construct
  REGION 1..39: note = Synthetic
SCDGGGGALGHPRVYINLDKETKTGTCGYCGLQFRQQHH

SEQ ID NO: 5439 - protein, 40 aa, synthetic construct
  REGION 1..40: note = Synthetic
RNGHEYYGDYYQRHYDEDSAIGPRSPYGFRHGASVNYDDY

SEQ ID NO: 5440 - protein, 24 aa, synthetic construct
  REGION 1..24: note = Synthetic
AIASHILTQAQIQAEKWGGGKIYY

SEQ ID NO: 5441 - protein, 27 aa, synthetic construct
  REGION 1..27: note = Synthetic
AGGYCKPGNTCCCKKKDSGPVDVPPTA

SEQ ID NO: 5442 - protein, 29 aa, synthetic construct
  REGION 1..29: note = Synthetic
TKVDTMVTTLRSFVEIESSKTLCEKIYLC

SEQ ID NO: 5443 - protein, 29 aa, synthetic construct
  REGION 1..29: note = Synthetic
TDYSDCIHEAIKANYCTKPQKSYVVEFSI

SEQ ID NO: 5444 - protein, 21 aa, synthetic construct
  REGION 1..21: note = Synthetic
AAMSTYAGIFTDQLLTLLRGE

SEQ ID NO: 5445 - protein, 24 aa, synthetic construct
  REGION 1..24: note = Synthetic
IYGGCYGNANNFKTIDECERTCAA

SEQ ID NO: 5446 - protein, 24 aa, synthetic construct
  REGION 1..24: note = Synthetic
IYGGCYGNANNFKTIDECERTCAA

SEQ ID NO: 5447 - protein, 29 aa, synthetic construct
  REGION 1..29: note = Synthetic
TDYSDCIQEAVKMNYCTKPQKPHVVGLSI

SEQ ID NO: 5448 - protein, 27 aa, synthetic construct
  REGION 1..27: note = Synthetic
ASIFQALRTIAGDDCELCVNVACTGCS

SEQ ID NO: 5449 - protein, 41 aa, synthetic construct
  REGION 1..41: note = Synthetic
CATCGGHLGHVFKGEGFATPTDERHCVNSVSLKFTPAASSL

SEQ ID NO: 5450 - protein, 26 aa, synthetic construct
  REGION 1..26: note = Synthetic
YNEGCEGIAARVEVSKNPNVCSYTSN

SEQ ID NO: 5451 - protein, 27 aa, synthetic construct
  REGION 1..27: note = Synthetic
IEDMARTFFAHFPLGSTLGFHVPYQED

SEQ ID NO: 5452 - protein, 25 aa, synthetic construct
  REGION 1..25: note = Synthetic
TGYALYTAFGQPSNELRDPFEEHED

SEQ ID NO: 5453 - protein, 27 aa, synthetic construct
  REGION 1..27: note = Synthetic
AGSAGGGSAGGDGPNNSLLSEFVYNNY

SEQ ID NO: 5454 - protein, 21 aa, synthetic construct
  REGION 1..21: note = Synthetic
IKEIHDAATACDPEAHHEHDH

SEQ ID NO: 5455 - protein, 25 aa, synthetic construct
  REGION 1..25: note = Synthetic
TGGADSVAAAAAVGGPILAALALLL

SEQ ID NO: 5456 - protein, 18 aa, synthetic construct
  REGION 1..18: note = Synthetic
ISLLTSALEYAKQVLPNR

SEQ ID NO: 5457 - protein, 30 aa, synthetic construct
  REGION 1..30: note = Synthetic
RTGEDFLEECMGGCAFDFCCKRSLRDTTSD

SEQ ID NO: 5458 - protein, 25 aa, synthetic construct
  REGION 1..25: note = Synthetic
TGYALYTAFGQPSEQLRDPFEEHED

SEQ ID NO: 5459 - protein, 25 aa, synthetic construct
  REGION 1..25: note = Synthetic
TGYALYTAFGQPSEQLRDPFEEHED

SEQ ID NO: 5460 - protein, 25 aa, synthetic construct
  REGION 1..25: note = Synthetic
TGYALYTAFGQPSEQLRDPFEEHED

SEQ ID NO: 5461 - protein, 25 aa, synthetic construct
  REGION 1..25: note = Synthetic
TGYALYTAFGQPSEQLRDPFEEHED

SEQ ID NO: 5462 - protein, 22 aa, synthetic construct
  REGION 1..22: note = Synthetic
AAVSTYAGIFTDQLLSMLKGDS

SEQ ID NO: 5463 - protein, 34 aa, synthetic construct
  REGION 1..34: note = Synthetic
GVSNGGTEMIQLSHIRERQRYWAQDNLRRRFLEK

SEQ ID NO: 5464 - protein, 41 aa, synthetic construct
  REGION 1..41: note = Synthetic
GGAAAAPAKGAAAARSPMASTTAVLVVAAAVAAPLLAFFHF

SEQ ID NO: 5465 - protein, 23 aa, synthetic construct
  REGION 1..23: note = Synthetic
YGGCGGNANNFKSGGECKRACGE

SEQ ID NO: 5466 - protein, 20 aa, synthetic construct
  REGION 1..20: note = Synthetic
ANEFTGLINALSCSPINVNL

SEQ ID NO: 5467 - protein, 22 aa, synthetic construct
  REGION 1..22: note = Synthetic
GHACYRNCWREGNDEETCKERC

SEQ ID NO: 5468 - protein, 23 aa, synthetic construct
  REGION 1..23: note = Synthetic
GHACYRNCWREGNDEETCKERCG

SEQ ID NO: 5469 - protein, 30 aa, synthetic construct
  REGION 1..30: note = Synthetic
HGNAIIDRGCSTSCPGGNRPVCCSTDLCNK

SEQ ID NO: 5470 - protein, 29 aa, synthetic construct
  REGION 1..29: note = Synthetic
LSAGAGSGLAGDHLSDISEPEPELDSRRH

SEQ ID NO: 5471 - protein, 25 aa, synthetic construct
  REGION 1..25: note = Synthetic
TGYALYTAFGQPSEQLRDPFEDHED

SEQ ID NO: 5472 - protein, 22 aa, synthetic construct
  REGION 1..22: note = Synthetic
TKADQLAQQAHNNRKLLDIAGK

SEQ ID NO: 5473 - protein, 21 aa, synthetic construct
  REGION 1..21: note = Synthetic
AAVSTYAGIFTDQLLTLLKGD

SEQ ID NO: 5474 - protein, 28 aa, synthetic construct
  REGION 1..28: note = Synthetic
ACAAGAVSICGHCAPTCGCGRAGLGGYY

SEQ ID NO: 5475 - protein, 24 aa, synthetic construct
  REGION 1..24: note = Synthetic
IYGGCYGNANNFKTIEECKRTCAA

SEQ ID NO: 5476 - protein, 24 aa, synthetic construct
  REGION 1..24: note = Synthetic
IYGGCYGNANNFKTIEECKRTCAA

SEQ ID NO: 5477 - protein, 24 aa, synthetic construct
  REGION 1..24: note = Synthetic
IYGGCYGNANNFKTIEECKRTCAA

SEQ ID NO: 5478 - protein, 34 aa, synthetic construct
  REGION 1..34: note = Synthetic
GGGGSCYHYCHGRCCSAAEAKALEATTAQVKPQN

SEQ ID NO: 5479 - protein, 16 aa, synthetic construct
  REGION 1..16: note = Synthetic
IKDFVDRLKAGQVRRE

SEQ ID NO: 5480 - protein, 34 aa, synthetic construct
  REGION 1..34: note = Synthetic
ANCARKYKGYGDCRPGDRPHDKKDSLFCFCNYPC

SEQ ID NO: 5481 - protein, 28 aa, synthetic construct
  REGION 1..28: note = Synthetic
QNGIDVAQKCCSTDCSSDYIKEICCPFD

SEQ ID NO: 5482 - protein, 24 aa, synthetic construct
  REGION 1..24: note = Synthetic
IQSILSSGGKRLGCIKIAASLKGR

SEQ ID NO: 5483 - protein, 27 aa, synthetic construct
  REGION 1..27: note = Synthetic
IEDMARTFFAHFPLGSTLGFHVPYQED

SEQ ID NO: 5484 - protein, 27 aa, synthetic construct
  REGION 1..27: note = Synthetic
KRCLASGETCWRDTSCCSFSCTNNVCF

SEQ ID NO: 5485 - protein, 27 aa, synthetic construct
  REGION 1..27: note = Synthetic
KRCLASGETCWRDTSCCSFSCTNNVCF

SEQ ID NO: 5486 - protein, 20 aa, synthetic construct
  REGION 1..20: note = Synthetic
ERLAYEATSIVNDVNLDHAY

SEQ ID NO: 5487 - protein, 25 aa, synthetic construct
  REGION 1..25: note = Synthetic
TGYALYTAFGQPSQQLRDPFEEHGD

SEQ ID NO: 5488 - protein, 25 aa, synthetic construct
  REGION 1..25: note = Synthetic
TGYALYTAFGQPSQQLRDPFEEHGD

SEQ ID NO: 5489 - protein, 25 aa, synthetic construct
  REGION 1..25: note = Synthetic
TGYALYTAFGQPSQQLRDPFEEHGD

SEQ ID NO: 5490 - protein, 25 aa, synthetic construct
  REGION 1..25: note = Synthetic
TGYALYTAFGQPSQQLRDPFEEHGD

SEQ ID NO: 5491 - protein, 25 aa, synthetic construct
  REGION 1..25: note = Synthetic
TGYALYTAFGQPSQQLRDPFEEHGD

SEQ ID NO: 5492 - protein, 25 aa, synthetic construct
  REGION 1..25: note = Synthetic
TGYALYTAFGQPSQQLRDPFEEHGD

SEQ ID NO: 5493 - protein, 25 aa, synthetic construct
  REGION 1..25: note = Synthetic
TGYALYTAFGQPSQQLRDPFEEHGD

SEQ ID NO: 5494 - protein, 25 aa, synthetic construct
  REGION 1..25: note = Synthetic
TGYALYTAFGQPSQQLRDPFEEHGD

SEQ ID NO: 5495 - protein, 25 aa, synthetic construct
  REGION 1..25: note = Synthetic
TGYALYTAFGQPSQQLRDPFEEHGD

SEQ ID NO: 5496 - protein, 25 aa, synthetic construct
  REGION 1..25: note = Synthetic
TGYALYTAFGQPSQQLRDPFEEHGD

SEQ ID NO: 5497 - protein, 25 aa, synthetic construct
  REGION 1..25: note = Synthetic
TGYALYTAFGQPSQQLRDPFEEHGD

SEQ ID NO: 5498 - protein, 25 aa, synthetic construct
  REGION 1..25: note = Synthetic
TGYALYTAFGQPSQQLRDPFEEHGD

SEQ ID NO: 5499 - protein, 25 aa, synthetic construct
  REGION 1..25: note = Synthetic
TGYALYTAFGQPSQQLRDPFEEHGD

SEQ ID NO: 5500 - protein, 25 aa, synthetic construct
  REGION 1..25: note = Synthetic
TGYALYTAFGQPSQQLRDPFEEHGD

SEQ ID NO: 5501 - protein, 25 aa, synthetic construct
  REGION 1..25: note = Synthetic
TGYALYTAFGQPSQQLRDPFEEHGD

SEQ ID NO: 5502 - protein, 25 aa, synthetic construct
  REGION 1..25: note = Synthetic
TGYALYTAFGQPSQQLRDPFEEHGD

SEQ ID NO: 5503 - protein, 25 aa, synthetic construct
  REGION 1..25: note = Synthetic
TGYALYTAFGQPSQQLRDPFEEHGD

SEQ ID NO: 5504 - protein, 25 aa, synthetic construct
  REGION 1..25: note = Synthetic
TGYALYTAFGQPSQQLRDPFEEHGD

SEQ ID NO: 5505 - protein, 25 aa, synthetic construct
  REGION 1..25: note = Synthetic
TGYALYTAFGQPSQQLRDPFEEHGD

SEQ ID NO: 5506 - protein, 25 aa, synthetic construct
  REGION 1..25: note = Synthetic
TGYALYTAFGQPSQQLRDPFEEHGD

SEQ ID NO: 5507 - protein, 25 aa, synthetic construct
  REGION 1..25: note = Synthetic
TGYALYTAFGQPSQQLRDPFEEHGD

SEQ ID NO: 5508 - protein, 25 aa, synthetic construct
  REGION 1..25: note = Synthetic
TGYALYTAFGQPSQQLRDPFEEHGD

SEQ ID NO: 5509 - protein, 25 aa, synthetic construct
  REGION 1..25: note = Synthetic
TGYALYTAFGQPSQQLRDPFEEHGD

SEQ ID NO: 5510 - protein, 25 aa, synthetic construct
  REGION 1..25: note = Synthetic
TGYALYTAFGQPSQQLRDPFEEHGD

SEQ ID NO: 5511 - protein, 25 aa, synthetic construct
  REGION 1..25: note = Synthetic
TGYALYTAFGQPSQQLRDPFEEHGD

SEQ ID NO: 5512 - protein, 25 aa, synthetic construct
  REGION 1..25: note = Synthetic
TGYALYTAFGQPSQQLRDPFEEHGD

SEQ ID NO: 5513 - protein, 25 aa, synthetic construct
  REGION 1..25: note = Synthetic
TGYALYTAFGQPSQQLRDPFEEHGD

SEQ ID NO: 5514 - protein, 25 aa, synthetic construct
  REGION 1..25: note = Synthetic
TGYALYTAFGQPSQQLRDPFEEHGD

SEQ ID NO: 5515 - protein, 25 aa, synthetic construct
  REGION 1..25: note = Synthetic
TGYALYTAFGQPSQQLRDPFEEHGD

SEQ ID NO: 5516 - protein, 25 aa, synthetic construct
  REGION 1..25: note = Synthetic
TGYALYTAFGQPSQQLRDPFEEHGD

SEQ ID NO: 5517 - protein, 25 aa, synthetic construct
  REGION 1..25: note = Synthetic
TGYALYTAFGQPSQQLRDPFEEHGD

SEQ ID NO: 5518 - protein, 25 aa, synthetic construct
  REGION 1..25: note = Synthetic
TGYALYTAFGQPSQQLRDPFEEHGD

SEQ ID NO: 5519 - protein, 25 aa, synthetic construct
  REGION 1..25: note = Synthetic
TGYALYTAFGQPSQQLRDPFEEHGD

SEQ ID NO: 5520 - protein, 25 aa, synthetic construct
  REGION 1..25: note = Synthetic
TGYALYTAFGQPSQQLRDPFEEHGD

SEQ ID NO: 5521 - protein, 25 aa, synthetic construct
  REGION 1..25: note = Synthetic
TGYALYTAFGQPSQQLRDPFEEHGD

SEQ ID NO: 5522 - protein, 25 aa, synthetic construct
  REGION 1..25: note = Synthetic
TGYALYTAFGQPSQQLRDPFEEHGD

SEQ ID NO: 5523 - protein, 25 aa, synthetic construct
  REGION 1..25: note = Synthetic
TGYALYTAFGQPSQQLRDPFEEHGD

SEQ ID NO: 5524 - protein, 25 aa, synthetic construct
  REGION 1..25: note = Synthetic
TGYALYTAFGQPSQQLRDPFEEHGD

SEQ ID NO: 5525 - protein, 25 aa, synthetic construct
  REGION 1..25: note = Synthetic
TGYALYTAFGQPSQQLRDPFEEHGD

SEQ ID NO: 5526 - protein, 25 aa, synthetic construct
  REGION 1..25: note = Synthetic
TGYALYTAFGQPSQQLRDPFEEHGD

SEQ ID NO: 5527 - protein, 25 aa, synthetic construct
  REGION 1..25: note = Synthetic
TGYALYTAFGQPSQQLRDPFEEHGD

SEQ ID NO: 5528 - protein, 25 aa, synthetic construct
  REGION 1..25: note = Synthetic
TGYALYTAFGQPSQQLRDPFEEHGD

SEQ ID NO: 5529 - protein, 25 aa, synthetic construct
  REGION 1..25: note = Synthetic
TGYALYTAFGQPSQQLRDPFEEHGD

SEQ ID NO: 5530 - protein, 25 aa, synthetic construct
  REGION 1..25: note = Synthetic
TGYALYTAFGQPSQQLRDPFEEHGD

SEQ ID NO: 5531 - protein, 25 aa, synthetic construct
  REGION 1..25: note = Synthetic
TGYALYTAFGQPSQQLRDPFEEHGD

SEQ ID NO: 5532 - protein, 25 aa, synthetic construct
  REGION 1..25: note = Synthetic
TGYALYTAFGQPSQQLRDPFEEHGD

SEQ ID NO: 5533 - protein, 25 aa, synthetic construct
  REGION 1..25: note = Synthetic
TGYALYTAFGQPSQQLRDPFEEHGD

SEQ ID NO: 5534 - protein, 25 aa, synthetic construct
  REGION 1..25: note = Synthetic
TGYALYTAFGQPSQQLRDPFEEHGD

SEQ ID NO: 5535 - protein, 25 aa, synthetic construct
  REGION 1..25: note = Synthetic
TGYALYTAFGQPSQQLRDPFEEHGD

SEQ ID NO: 5536 - protein, 25 aa, synthetic construct
  REGION 1..25: note = Synthetic
TGYALYTAFGQPSQQLRDPFEEHGD

SEQ ID NO: 5537 - protein, 25 aa, synthetic construct
  REGION 1..25: note = Synthetic
TGYALYTAFGQPSQQLRDPFEEHGD

SEQ ID NO: 5538 - protein, 25 aa, synthetic construct
  REGION 1..25: note = Synthetic
TGYALYTAFGQPSQQLRDPFEEHGD

SEQ ID NO: 5539 - protein, 25 aa, synthetic construct
  REGION 1..25: note = Synthetic
TGYALYTAFGQPSQQLRDPFEEHGD

SEQ ID NO: 5540 - protein, 25 aa, synthetic construct
  REGION 1..25: note = Synthetic
TGYALYTAFGQPSQQLRDPFEEHGD

SEQ ID NO: 5541 - protein, 25 aa, synthetic construct
  REGION 1..25: note = Synthetic
TGYALYTAFGQPSQQLRDPFEEHGD

SEQ ID NO: 5542 - protein, 25 aa, synthetic construct
  REGION 1..25: note = Synthetic
TGYALYTAFGQPSQQLRDPFEEHGD

SEQ ID NO: 5543 - protein, 25 aa, synthetic construct
  REGION 1..25: note = Synthetic
TGYALYTAFGQPSQQLRDPFEEHGD

SEQ ID NO: 5544 - protein, 25 aa, synthetic construct
  REGION 1..25: note = Synthetic
TGYALYTAFGQPSQQLRDPFEEHGD

SEQ ID NO: 5545 - protein, 25 aa, synthetic construct
  REGION 1..25: note = Synthetic
TGYALYTAFGQPSQQLRDPFEEHGD

SEQ ID NO: 5546 - protein, 25 aa, synthetic construct
  REGION 1..25: note = Synthetic
TGYALYTAFGQPSQQLRDPFEEHGD

SEQ ID NO: 5547 - protein, 25 aa, synthetic construct
  REGION 1..25: note = Synthetic
TGYALYTAFGQPSQQLRDPFEEHGD

SEQ ID NO: 5548 - protein, 25 aa, synthetic construct
  REGION 1..25: note = Synthetic
TGYALYTAFGQPSQQLRDPFEEHGD

SEQ ID NO: 5549 - protein, 25 aa, synthetic construct
  REGION 1..25: note = Synthetic
TGYALYTAFGQPSQQLRDPFEEHGD

SEQ ID NO: 5550 - protein, 25 aa, synthetic construct
  REGION 1..25: note = Synthetic
TGYALYTAFGQPSQQLRDPFEEHGD

SEQ ID NO: 5551 - protein, 25 aa, synthetic construct
  REGION 1..25: note = Synthetic
TGYALYTAFGQPSQQLRDPFEEHGD

SEQ ID NO: 5552 - protein, 25 aa, synthetic construct
  REGION 1..25: note = Synthetic
TGYALYTAFGQPSQQLRDPFEEHGD

SEQ ID NO: 5553 - protein, 25 aa, synthetic construct
  REGION 1..25: note = Synthetic
TGYALYTAFGQPSQQLRDPFEEHGD

SEQ ID NO: 5554 - protein, 25 aa, synthetic construct
  REGION 1..25: note = Synthetic
TGYALYTAFGQPSQQLRDPFEEHGD

SEQ ID NO: 5555 - protein, 25 aa, synthetic construct
  REGION 1..25: note = Synthetic
TGYALYTAFGQPSQQLRDPFEEHGD

SEQ ID NO: 5556 - protein, 25 aa, synthetic construct
  REGION 1..25: note = Synthetic
TGYALYTAFGQPSQQLRDPFEEHGD

SEQ ID NO: 5557 - protein, 25 aa, synthetic construct
  REGION 1..25: note = Synthetic
TGYALYTAFGQPSQQLRDPFEEHGD

SEQ ID NO: 5558 - protein, 25 aa, synthetic construct
  REGION 1..25: note = Synthetic
TGYALYTAFGQPSQQLRDPFEEHGD

SEQ ID NO: 5559 - protein, 25 aa, synthetic construct
  REGION 1..25: note = Synthetic
TGYALYTAFGQPSQQLRDPFEEHGD

SEQ ID NO: 5560 - protein, 25 aa, synthetic construct
  REGION 1..25: note = Synthetic
TGYALYTAFGQPSQQLRDPFEEHGD

SEQ ID NO: 5561 - protein, 25 aa, synthetic construct
  REGION 1..25: note = Synthetic
TGYALYTAFGQPSQQLRDPFEEHGD

SEQ ID NO: 5562 - protein, 25 aa, synthetic construct
  REGION 1..25: note = Synthetic
TGYALYTAFGQPSQQLRDPFEEHGD

SEQ ID NO: 5563 - protein, 25 aa, synthetic construct
  REGION 1..25: note = Synthetic
TGYALYTAFGQPSQQLRDPFEEHGD

SEQ ID NO: 5564 - protein, 25 aa, synthetic construct
  REGION 1..25: note = Synthetic
TGYALYTAFGQPSQQLRDPFEEHGD

SEQ ID NO: 5565 - protein, 25 aa, synthetic construct
  REGION 1..25: note = Synthetic
TGYALYTAFGQPSQQLRDPFEEHGD

SEQ ID NO: 5566 - protein, 25 aa, synthetic construct
  REGION 1..25: note = Synthetic
TGYALYTAFGQPSQQLRDPFEEHGD

SEQ ID NO: 5567 - protein, 25 aa, synthetic construct
  REGION 1..25: note = Synthetic
TGYALYTAFGQPSQQLRDPFEEHGD

SEQ ID NO: 5568 - protein, 25 aa, synthetic construct
  REGION 1..25: note = Synthetic
TGYALYTAFGQPSQQLRDPFEEHGD

SEQ ID NO: 5569 - protein, 25 aa, synthetic construct
  REGION 1..25: note = Synthetic
TGYALYTAFGQPSQQLRDPFEEHGD

SEQ ID NO: 5570 - protein, 25 aa, synthetic construct
  REGION 1..25: note = Synthetic
TGYALYTAFGQPSQQLRDPFEEHGD

SEQ ID NO: 5571 - protein, 25 aa, synthetic construct
  REGION 1..25: note = Synthetic
TGYALYTAFGQPSQQLRDPFEEHGD

SEQ ID NO: 5572 - protein, 25 aa, synthetic construct
  REGION 1..25: note = Synthetic
TGYALYTAFGQPSQQLRDPFEEHGD

SEQ ID NO: 5573 - protein, 25 aa, synthetic construct
  REGION 1..25: note = Synthetic
TGYALYTAFGQPSQQLRDPFEEHGD

SEQ ID NO: 5574 - protein, 25 aa, synthetic construct
  REGION 1..25: note = Synthetic
TGYALYTAFGQPSQQLRDPFEEHGD

SEQ ID NO: 5575 - protein, 25 aa, synthetic construct
  REGION 1..25: note = Synthetic
TGYALYTAFGQPSQQLRDPFEEHGD

SEQ ID NO: 5576 - protein, 25 aa, synthetic construct
  REGION 1..25: note = Synthetic
TGYALYTAFGQPSQQLRDPFEEHGD

SEQ ID NO: 5577 - protein, 25 aa, synthetic construct
  REGION 1..25: note = Synthetic
TGYALYTAFGQPSQQLRDPFEEHGD

SEQ ID NO: 5578 - protein, 25 aa, synthetic construct
  REGION 1..25: note = Synthetic
TGYALYTAFGQPSQQLRDPFEEHGD

SEQ ID NO: 5579 - protein, 25 aa, synthetic construct
  REGION 1..25: note = Synthetic
TGYALYTAFGQPSQQLRDPFEEHGD

SEQ ID NO: 5580 - protein, 25 aa, synthetic construct
  REGION 1..25: note = Synthetic
TGYALYTAFGQPSQQLRDPFEEHGD

SEQ ID NO: 5581 - protein, 25 aa, synthetic construct
  REGION 1..25: note = Synthetic
TGYALYTAFGQPSQQLRDPFEEHGD

SEQ ID NO: 5582 - protein, 25 aa, synthetic construct
  REGION 1..25: note = Synthetic
TGYALYTAFGQPSQQLRDPFEEHGD

SEQ ID NO: 5583 - protein, 25 aa, synthetic construct
  REGION 1..25: note = Synthetic
TGYALYTAFGQPSQQLRDPFEEHGD

SEQ ID NO: 5584 - protein, 25 aa, synthetic construct
  REGION 1..25: note = Synthetic
TGYALYTAFGQPSQQLRDPFEEHGD

SEQ ID NO: 5585 - protein, 25 aa, synthetic construct
  REGION 1..25: note = Synthetic
TGYALYTAFGQPSQQLRDPFEEHGD

SEQ ID NO: 5586 - protein, 25 aa, synthetic construct
  REGION 1..25: note = Synthetic
TGYALYTAFGQPSQQLRDPFEEHGD

SEQ ID NO: 5587 - protein, 25 aa, synthetic construct
  REGION 1..25: note = Synthetic
TGYALYTAFGQPSQQLRDPFEEHGD

SEQ ID NO: 5588 - protein, 25 aa, synthetic construct
  REGION 1..25: note = Synthetic
TGYALYTAFGQPSQQLRDPFEEHGD

SEQ ID NO: 5589 - protein, 25 aa, synthetic construct
  REGION 1..25: note = Synthetic
TGYALYTAFGQPSQQLRDPFEEHGD

SEQ ID NO: 5590 - protein, 25 aa, synthetic construct
  REGION 1..25: note = Synthetic
TGYALYTAFGQPSQQLRDPFEEHGD

SEQ ID NO: 5591 - protein, 25 aa, synthetic construct
  REGION 1..25: note = Synthetic
TGYALYTAFGQPSQQLRDPFEEHGD

SEQ ID NO: 5592 - protein, 25 aa, synthetic construct
  REGION 1..25: note = Synthetic
TGYALYTAFGQPSQQLRDPFEEHGD

SEQ ID NO: 5593 - protein, 25 aa, synthetic construct
  REGION 1..25: note = Synthetic
TGYALYTAFGQPSQQLRDPFEEHGD

SEQ ID NO: 5594 - protein, 25 aa, synthetic construct
  REGION 1..25: note = Synthetic
TGYALYTAFGQPSQQLRDPFEEHGD

SEQ ID NO: 5595 - protein, 25 aa, synthetic construct
  REGION 1..25: note = Synthetic
TGYALYTAFGQPSQQLRDPFEEHGD

SEQ ID NO: 5596 - protein, 25 aa, synthetic construct
  REGION 1..25: note = Synthetic
TGYALYTAFGQPSQQLRDPFEEHGD

SEQ ID NO: 5597 - protein, 25 aa, synthetic construct
  REGION 1..25: note = Synthetic
TGYALYTAFGQPSQQLRDPFEEHGD

SEQ ID NO: 5598 - protein, 25 aa, synthetic construct
  REGION 1..25: note = Synthetic
TGYALYTAFGQPSQQLRDPFEEHGD

SEQ ID NO: 5599 - protein, 25 aa, synthetic construct
  REGION 1..25: note = Synthetic
TGYALYTAFGQPSQQLRDPFEEHGD

SEQ ID NO: 5600 - protein, 25 aa, synthetic construct
  REGION 1..25: note = Synthetic
TGYALYTAFGQPSQQLRDPFEEHGD

SEQ ID NO: 5601 - protein, 25 aa, synthetic construct
  REGION 1..25: note = Synthetic
TGYALYTAFGQPSQQLRDPFEEHGD

SEQ ID NO: 5602 - protein, 25 aa, synthetic construct
  REGION 1..25: note = Synthetic
TGYALYTAFGQPSQQLRDPFEEHGD

SEQ ID NO: 5603 - protein, 25 aa, synthetic construct
  REGION 1..25: note = Synthetic
TGYALYTAFGQPSQQLRDPFEEHGD

SEQ ID NO: 5604 - protein, 25 aa, synthetic construct
  REGION 1..25: note = Synthetic
TGYALYTAFGQPSQQLRDPFEEHGD

SEQ ID NO: 5605 - protein, 25 aa, synthetic construct
  REGION 1..25: note = Synthetic
TGYALYTAFGQPSQQLRDPFEEHGD

SEQ ID NO: 5606 - protein, 25 aa, synthetic construct
  REGION 1..25: note = Synthetic
TGYALYTAFGQPSQQLRDPFEEHGD

SEQ ID NO: 5607 - protein, 34 aa, synthetic construct
  REGION 1..34: note = Synthetic
AIQCVESACESLCTEGEDRTGCYMYIYSNCPPYV

SEQ ID NO: 5608 - protein, 39 aa, synthetic construct
  REGION 1..39: note = Synthetic
CNSLGRNFTGGECSDARFPGLSVCYCCHNVESSAEMESM

SEQ ID NO: 5609 - protein, 24 aa, synthetic construct
  REGION 1..24: note = Synthetic
DEMNTVLDSLATRDFINWLLQTKI

SEQ ID NO: 5610 - protein, 28 aa, synthetic construct
  REGION 1..28: note = Synthetic
DEMSTILDNLATRDFINWLIQTKITDKK

SEQ ID NO: 5611 - protein, 24 aa, synthetic construct
  REGION 1..24: note = Synthetic
IYGGCYGNANNFKAIEECKRTCAA

SEQ ID NO: 5612 - protein, 42 aa, synthetic construct
  REGION 1..42: note = Synthetic
CLKSAASSFTGLDLGKAASLPSTCSVNIPYKISPSTDCSKVQ

SEQ ID NO: 5613 - protein, 17 aa, synthetic construct
  REGION 1..17: note = Synthetic
GGYCKSMSHGGQCHCYC

SEQ ID NO: 5614 - protein, 26 aa, synthetic construct
  REGION 1..26: note = Synthetic
AALENFGQRMNLIIPGNCSNLVCPSN

SEQ ID NO: 5615 - protein, 20 aa, synthetic construct
  REGION 1..20: note = Synthetic
ERLAYEATSIVNDVNLDHAY

SEQ ID NO: 5616 - protein, 24 aa, synthetic construct
  REGION 1..24: note = Synthetic
TKGADKCDTAYQLFECYYKNRAHI

SEQ ID NO: 5617 - protein, 30 aa, synthetic construct
  REGION 1..30: note = Synthetic
YCTGAGAAAAMVLCTWMACFAGKKQKHYPY

SEQ ID NO: 5618 - protein, 36 aa, synthetic construct
  REGION 1..36: note = Synthetic
GTGMFRMARGYAIARTNWFDPKTGDAIVGYNVTIMH

SEQ ID NO: 5619 - protein, 25 aa, synthetic construct
  REGION 1..25: note = Synthetic
TCLTKMVECIQLPLDVEDSSDTLCC

SEQ ID NO: 5620 - protein, 23 aa, synthetic construct
  REGION 1..23: note = Synthetic
AAKGAGTASKLTFGTGTRLQVTL

SEQ ID NO: 5621 - protein, 39 aa, synthetic construct
  REGION 1..39: note = Synthetic
GIGHFCGKFFNNAVCAEGLKCAKLGEGADGEALEICLRA

SEQ ID NO: 5622 - protein, 25 aa, synthetic construct
  REGION 1..25: note = Synthetic
TGYSLYTSFGNASSELRDPFEEHED

SEQ ID NO: 5623 - protein, 22 aa, synthetic construct
  REGION 1..22: note = Synthetic
TLAGSFVTAYPQYRRGDQLDLR

SEQ ID NO: 5624 - protein, 14 aa, synthetic construct
  REGION 1..14: note = Synthetic
LITALSALVTWMQF

SEQ ID NO: 5625 - protein, 42 aa, synthetic construct
  REGION 1..42: note = Synthetic
GLSCCHRYGGLAERAGCKSVLNQVTCEYEFYRLDDLSKRCDA

SEQ ID NO: 5626 - protein, 27 aa, synthetic construct
  REGION 1..27: note = Synthetic
VEDLARTFFAHFPLGSTLGFHVPYQED

SEQ ID NO: 5627 - protein, 30 aa, synthetic construct
  REGION 1..30: note = Synthetic
MADIVSAGWAFLMVSFTFSLSLVVWGRSGL

SEQ ID NO: 5628 - protein, 31 aa, synthetic construct
  REGION 1..31: note = Synthetic
EQLENGGTSLSEKTVLLLVTPLLAAAWCLHP

SEQ ID NO: 5629 - protein, 22 aa, synthetic construct
  REGION 1..22: note = Synthetic
AAVTTYAGIFTDQLFSMLKGEQ

SEQ ID NO: 5630 - protein, 21 aa, synthetic construct
  REGION 1..21: note = Synthetic
NVYEYANDFASTCASLSSSPA

SEQ ID NO: 5631 - protein, 29 aa, synthetic construct
  REGION 1..29: note = Synthetic
EISTYVGAAVKGSVAGMGAIMGAAAFALL

SEQ ID NO: 5632 - protein, 29 aa, synthetic construct
  REGION 1..29: note = Synthetic
EISTYVGAAVKGSVAGMGAIMGAAAFALL

SEQ ID NO: 5633 - protein, 29 aa, synthetic construct
  REGION 1..29: note = Synthetic
EISTYVGAAVKGSVAGMGAIMGAAAFALL

SEQ ID NO: 5634 - protein, 29 aa, synthetic construct
  REGION 1..29: note = Synthetic
EISTYVGAAVKGSVAGMGAIMGAAAFALL

SEQ ID NO: 5635 - protein, 29 aa, synthetic construct
  REGION 1..29: note = Synthetic
EISTYVGAAVKGSVAGMGAIMGAAAFALL

SEQ ID NO: 5636 - protein, 22 aa, synthetic construct
  REGION 1..22: note = Synthetic
AAMSTYAGILTDQVLSMLKGEE

SEQ ID NO: 5637 - protein, 25 aa, synthetic construct
  REGION 1..25: note = Synthetic
TGYSLYTAFGEPSAELRDPFEEHED

SEQ ID NO: 5638 - protein, 24 aa, synthetic construct
  REGION 1..24: note = Synthetic
SCLSVADEIASSLRNGDIGPFHVG

SEQ ID NO: 5639 - protein, 22 aa, synthetic construct
  REGION 1..22: note = Synthetic
TKADQLAQQAHSNRKLLDIAGK

SEQ ID NO: 5640 - protein, 24 aa, synthetic construct
  REGION 1..24: note = Synthetic
AAHCIARGNRGGYCNSKKVCVCRN

SEQ ID NO: 5641 - protein, 18 aa, synthetic construct
  REGION 1..18: note = Synthetic
KNVAGALVGVVAIAAAMM

SEQ ID NO: 5642 - protein, 24 aa, synthetic construct
  REGION 1..24: note = Synthetic
IYGGCYGNANNFKTIEECKLTCAA

SEQ ID NO: 5643 - protein, 13 aa, synthetic construct
  REGION 1..13: note = Synthetic
GHGGYGHGGRGGY

SEQ ID NO: 5644 - protein, 31 aa, synthetic construct
  REGION 1..31: note = Synthetic
RSCGNLGESCSAHRCCPGLMCMGEASICIPY

SEQ ID NO: 5645 - protein, 37 aa, synthetic construct
  REGION 1..37: note = Synthetic
GTAVIAAVVAALLWKFSRRRSGAPREGGENENGGEEK

SEQ ID NO: 5646 - protein, 23 aa, synthetic construct
  REGION 1..23: note = Synthetic
NTAVSWLRTIFHDCMVESCDASI

SEQ ID NO: 5647 - protein, 41 aa, synthetic construct
  REGION 1..41: note = Synthetic
MKDFTTYLSTAPVVAFAWITITAGLLIEINRFFPDPLVFSF

SEQ ID NO: 5648 - protein, 17 aa, synthetic construct
  REGION 1..17: note = Synthetic
EKCCKNGCGFMTCSRPR

SEQ ID NO: 5649 - protein, 31 aa, synthetic construct
  REGION 1..31: note = Synthetic
VSDGVSAGVGVGVAMIIQTSPSACKKYYKLY

SEQ ID NO: 5650 - protein, 37 aa, synthetic construct
  REGION 1..37: note = Synthetic
GSSAEALLSDLHAFSGSAAWDDSAGGAGGQGLRVTAL

SEQ ID NO: 5651 - protein, 37 aa, synthetic construct
  REGION 1..37: note = Synthetic
NLQGVCAEGFACITLSGNPVMNLNGGGQEVGRCRKKY

SEQ ID NO: 5652 - protein, 39 aa, synthetic construct
  REGION 1..39: note = Synthetic
VSKATDCIEAGNYCGPTVMKICCGFCSPFSKICMNYPQN

SEQ ID NO: 5653 - protein, 23 aa, synthetic construct
  REGION 1..23: note = Synthetic
YGGCGGNANNFKSRGECKRTCAE

SEQ ID NO: 5654 - protein, 21 aa, synthetic construct
  REGION 1..21: note = Synthetic
DVYTYANGFASTCASLSSSSA

SEQ ID NO: 5655 - protein, 41 aa, synthetic construct
  REGION 1..41: note = Synthetic
ISELSNGAETVSSSFLEEVTETSESTVEFPLAETTTFSSTS

SEQ ID NO: 5656 - protein, 28 aa, synthetic construct
  REGION 1..28: note = Synthetic
DEMNTILDNLATRDFINWLIQTKITDKK

SEQ ID NO: 5657 - protein, 22 aa, synthetic construct
  REGION 1..22: note = Synthetic
AAMSTYTGIFTDQVLSVLKGEE

SEQ ID NO: 5658 - protein, 22 aa, synthetic construct
  REGION 1..22: note = Synthetic
AAMSTYTGIFTDQVLSVLKGEE

SEQ ID NO: 5659 - protein, 23 aa, synthetic construct
  REGION 1..23: note = Synthetic
VFQGVSAWFALVFTVGVLNSLVA

SEQ ID NO: 5660 - protein, 32 aa, synthetic construct
  REGION 1..32: note = Synthetic
KAAKAVLDAAPADKFKLMDESFKVAAMEVIVS

SEQ ID NO: 5661 - protein, 26 aa, synthetic construct
  REGION 1..26: note = Synthetic
AMLGFIAALLTESLTGQGTLHFLGIL

SEQ ID NO: 5662 - protein, 14 aa, synthetic construct
  REGION 1..14: note = Synthetic
TWVQEYITELELNA

SEQ ID NO: 5663 - protein, 22 aa, synthetic construct
  REGION 1..22: note = Synthetic
SAAATMIASFSAILIALLFALL

SEQ ID NO: 5664 - protein, 23 aa, synthetic construct
  REGION 1..23: note = Synthetic
NTAVSWLRTIFHDCMVESCDASI

SEQ ID NO: 5665 - protein, 23 aa, synthetic construct
  REGION 1..23: note = Synthetic
NTAVSWLRTIFHDCMVESCDASI

SEQ ID NO: 5666 - protein, 41 aa, synthetic construct
  REGION 1..41: note = Synthetic
MKDFTTYLSTAPVIATIWFTFTAGLLIEINRYFPDPLVFSF

SEQ ID NO: 5667 - protein, 29 aa, synthetic construct
  REGION 1..29: note = Synthetic
NFATSVRYFLNNAATGETVFCNQFRVKVA

SEQ ID NO: 5668 - protein, 22 aa, synthetic construct
  REGION 1..22: note = Synthetic
AAVSTYAGIFTDQVLSMLRGEE

SEQ ID NO: 5669 - protein, 33 aa, synthetic construct
  REGION 1..33: note = Synthetic
DVAAEIMSGLIALAIDSCCSDSDCNANHPDMCS

SEQ ID NO: 5670 - protein, 14 aa, synthetic construct
  REGION 1..14: note = Synthetic
TWVQEYITDLELNA

SEQ ID NO: 5671 - protein, 17 aa, synthetic construct
  REGION 1..17: note = Synthetic
VSGIIAAYTAYYGPIPY

SEQ ID NO: 5672 - protein, 22 aa, synthetic construct
  REGION 1..22: note = Synthetic
AAMSTYTGIFTDQVLSVLKGEE

SEQ ID NO: 5673 - protein, 22 aa, synthetic construct
  REGION 1..22: note = Synthetic
SEAEDFFSKITQKDLLKSVSTA

SEQ ID NO: 5674 - protein, 41 aa, synthetic construct
  REGION 1..41: note = Synthetic
LAGLVQALLALPLAVLVALVALTESIARSSCSIGLSECGLL

SEQ ID NO: 5675 - protein, 22 aa, synthetic construct
  REGION 1..22: note = Synthetic
SEAEDFFSKITQKDLLKSVSTA

SEQ ID NO: 5676 - protein, 23 aa, synthetic construct
  REGION 1..23: note = Synthetic
YGGCGGNANNFKSRGECKRTCAE

SEQ ID NO: 5677 - protein, 25 aa, synthetic construct
  REGION 1..25: note = Synthetic
YSAGRGIVDECCLRPCSVDVLLSYC

SEQ ID NO: 5678 - protein, 37 aa, synthetic construct
  REGION 1..37: note = Synthetic
TFHRLVHTVFTPSNQDTFECEVVHEGVKKTVKWEPDN

SEQ ID NO: 5679 - protein, 40 aa, synthetic construct
  REGION 1..40: note = Synthetic
GGGYGGGYGGRYGGNYGSSSWGSYSSYSSGGYSSYNSGFW

SEQ ID NO: 5680 - protein, 31 aa, synthetic construct
  REGION 1..31: note = Synthetic
GYGKGGGGGGGGGGDGGGGGGGGSAYVGRHE

SEQ ID NO: 5681 - protein, 39 aa, synthetic construct
  REGION 1..39: note = Synthetic
KLVSEAFHQLSIQKEDALKTLEMQVDTLSDLIKSKLLND

SEQ ID NO: 5682 - protein, 30 aa, synthetic construct
  REGION 1..30: note = Synthetic
SYGSEYGNSGYACNFPCSYGRFLLAPRKKF

SEQ ID NO: 5683 - protein, 22 aa, synthetic construct
  REGION 1..22: note = Synthetic
AAMSTYAGILTDQVLSMLKGEE

SEQ ID NO: 5684 - protein, 28 aa, synthetic construct
  REGION 1..28: note = Synthetic
GDSCSKAYHAGMCFMNSNLQLVQHSVKV

SEQ ID NO: 5685 - protein, 42 aa, synthetic construct
  REGION 1..42: note = Synthetic
IDGAWSIWADAGVANPAGNTDCVGIAARVEDVTNPNSCVYTQ

SEQ ID NO: 5686 - protein, 42 aa, synthetic construct; identical to SEQ ID NO: 5685
  REGION 1..42: note = Synthetic

SEQ ID NO: 5687 - protein, 27 aa, synthetic construct
  REGION 1..27: note = Synthetic
GCGGVCAYGESCPSSCNTCYSAQCTAQ

SEQ ID NO: 5688 - protein, 28 aa, synthetic construct
  REGION 1..28: note = Synthetic
RDGCSNAGAFCGIHPGLCCSEICIVWCT

SEQ ID NO: 5689 - protein, 29 aa, synthetic construct
  REGION 1..29: note = Synthetic
ATAISTLSGFCGVVLGFTIDPNTDCNFIQ

SEQ ID NO: 5690 - protein, 31 aa, synthetic construct
  REGION 1..31: note = Synthetic
GHGGCHHYCHGSCCSAAEAKALEAAQVKPQN

SEQ ID NO: 5691 - protein, 40 aa, synthetic construct
  REGION 1..40: note = Synthetic
QNGHDYYGDYYQRHYDEDAAIGPRSREGFRHGASVNYDDY

SEQ ID NO: 5692 - protein, 33 aa, synthetic construct
  REGION 1..33: note = Synthetic
DVAAEMMSGLIALAIDSCCSDSDCNANHPDMCS

SEQ ID NO: 5693 - protein, 28 aa, synthetic construct
  REGION 1..28: note = Synthetic
MSEARNLFTTFGILAILLFFLYLIYAVL

SEQ ID NO: 5694 - protein, 36 aa, synthetic construct
  REGION 1..36: note = Synthetic
GMCSGIGQGCGQDSNCCGDMCCYGQICAMTFAACGP

SEQ ID NO: 5695 - protein, 31 aa, synthetic construct
  REGION 1..31: note = Synthetic
HLLRNMIEMARIESQKEQAELNRKYLDEVGK

SEQ ID NO: 5696 - protein, 35 aa, synthetic construct
  REGION 1..35: note = Synthetic
SDVNKVLDSLAAKEYLLWVMTSKTSGKSNKRQEDH

SEQ ID NO: 5697 - protein, 22 aa, synthetic construct
  REGION 1..22: note = Synthetic
TCISQLAQYADSLLVPETKDAA

SEQ ID NO: 5698 - protein, 21 aa, synthetic construct
  REGION 1..21: note = Synthetic
GYCGSGNAYCGAGNCRCQCRG

SEQ ID NO: 5699 - protein, 22 aa, synthetic construct
  REGION 1..22: note = Synthetic
AAMSTYTGIFTDQVLSVLKGEE

SEQ ID NO: 5700 - protein, 30 aa, synthetic construct
  REGION 1..30: note = Synthetic
NAMPAFGGRLADEDIENVANYVLNKSENGW

SEQ ID NO: 5701 - protein, 14 aa, synthetic construct
  REGION 1..14: note = Synthetic
IIAAYTAYYGPIPY

SEQ ID NO: 5702 - protein, 28 aa, synthetic construct
  REGION 1..28: note = Synthetic
DEMNTILDSLATRDFINWLIQTKITDKK

SEQ ID NO: 5703 - protein, 35 aa, synthetic construct
  REGION 1..35: note = Synthetic
GFAATLVTEAECNLATISGVAECPWILGGGTMPSK

SEQ ID NO: 5704 - protein, 36 aa, synthetic construct
  REGION 1..36: note = Synthetic
SEIGGGCKEGEGEEECLARRTLTAHTDYIYTQQHHN

SEQ ID NO: 5705 - protein, 33 aa, synthetic construct
  REGION 1..33: note = Synthetic
EALEEFKEVARAKGLNPDIVRPQQSETCSPGGN

SEQ ID NO: 5706 - protein, 35 aa, synthetic construct
  REGION 1..35: note = Synthetic
RNAAAKASGLVSLTDRRPECCSHPACNVDHPEICR

SEQ ID NO: 5707 - protein, 19 aa, synthetic construct
  REGION 1..19: note = Synthetic
LGTCYTAGCSCSWPVCTRN

SEQ ID NO: 5708 - protein, 30 aa, synthetic construct
  REGION 1..30: note = Synthetic
FAQEADHVADKLCTEKSGLCQDSAAIHTEL

SEQ ID NO: 5709 - protein, 30 aa, synthetic construct
  REGION 1..30: note = Synthetic
GLPTCGETCFGGTCNTPGCSCSSWPICTRD

SEQ ID NO: 5710 - protein, 27 aa, synthetic construct
  REGION 1..27: note = Synthetic
ASCLEKFNEYAAGLPVRDVYTSDCLPE

SEQ ID NO: 5711 - protein, 28 aa, synthetic construct
  REGION 1..28: note = Synthetic
VKGCAKTCPTAGPGERVKCCYSPRCNKN

SEQ ID NO: 5712 - protein, 31 aa, synthetic construct
  REGION 1..31: note = Synthetic
GLPTCGETCFGGTCNTPGCTCDSSWPICTHN

SEQ ID NO: 5713 - protein, 30 aa, synthetic construct
  REGION 1..30: note = Synthetic
GLPTCGETCFGGTCNTPGCTCDPWPVCTHN

SEQ ID NO: 5714 - protein, 41 aa, synthetic construct
  REGION 1..41: note = Synthetic
IAKAVACAKHIVSEQGITAWVAWKSHCRDHDVSSYVEGCTL

SEQ ID NO: 5715 - protein, 41 aa, synthetic construct
  REGION 1..41: note = Synthetic
IAKAVACAKHIVSEQGITAWVAWKSHCRDHDVSSYVQGCTL

SEQ ID NO: 5716 - protein, 39 aa, synthetic construct
  REGION 1..39: note = Synthetic
GNNYGKGYGGGSGKGKGGGKGGKGGKGGTYKPSHYGGGY

SEQ ID NO: 5717 - protein, 39 aa, synthetic construct; identical to SEQ ID NO: 5716
  REGION 1..39: note = Synthetic

SEQ ID NO: 5718 - protein, 34 aa, synthetic construct
  REGION 1..34: note = Synthetic
SGYCQWAGRYGNACWCIDLPDKVPIRIPGPCRGR

SEQ ID NO: 5719 - protein, 20 aa, synthetic construct
  REGION 1..20: note = Synthetic
GRGFCNSFGNYNFCQCEYPC

SEQ ID NO: 5720 - protein, 31 aa, synthetic construct
  REGION 1..31: note = Synthetic
RSCGHSGAGCYTRPCCPGLHCSGGHAGGLCV

SEQ ID NO: 5721 - protein, 28 aa, synthetic construct
  REGION 1..28: note = Synthetic
VKGCAKTCPTAQPGESVQCCNTPKCNDY

SEQ ID NO: 5722 - protein, 19 aa, synthetic construct
  REGION 1..19: note = Synthetic
ADAQGIVAAYQAFYGPIPF

SEQ ID NO: 5723 - protein, 41 aa, synthetic construct
  REGION 1..41: note = Synthetic
IAKAVACAKQIVSEQGITAWVAWKSHCRDHDVSSYVEGCTL

SEQ ID NO: 5724 - protein, 32 aa, synthetic construct
  REGION 1..32: note = Synthetic
SAAHIVNHAISAVNHQTSLLSYIAFVATGKLS

SEQ ID NO: 5725 - protein, 41 aa, synthetic construct
  REGION 1..41: note = Synthetic
GRGGSEYYGGFHQHHYDEDAAIGPRNPYTYRHGAGVNYDDY

SEQ ID NO: 5726 - protein, 33 aa, synthetic construct
  REGION 1..33: note = Synthetic
EKCMAKYKGVGTVTYFPFPPETIIIYCECLYDC

SEQ ID NO: 5727 - protein, 26 aa, synthetic construct
  REGION 1..26: note = Synthetic
NAKRYLRTLWNSRDCCDPKEPCCFIG

SEQ ID NO: 5728 - protein, 41 aa, synthetic construct
  REGION 1..41: note = Synthetic
HGVNNLGQDGHGQHGYAHGHSDQHGHGGQHGQHDGYKNRGY

SEQ ID NO: 5729 - protein, 32 aa, synthetic construct
  REGION 1..32: note = Synthetic
KACGSNIAACCQTGDSEGNLLNLEANCLAIPL

SEQ ID NO: 5730 - protein, 14 aa, synthetic construct
  REGION 1..14: note = Synthetic
LFASVVALASGFIF

SEQ ID NO: 5731 - protein, 17 aa, synthetic construct
  REGION 1..17: note = Synthetic
EFFNAIWGPGTLVTVSS

SEQ ID NO: 5732 - protein, 24 aa, synthetic construct
  REGION 1..24: note = Synthetic
AGGKCVHIGQSLDFVCVCFPKYYI

SEQ ID NO: 5733 - protein, 17 aa, synthetic construct
  REGION 1..17: note = Synthetic
AAQNFVAWLKSGQPKQE

SEQ ID NO: 5734 - protein, 28 aa, synthetic construct
  REGION 1..28: note = Synthetic
FARGYAQAKTYKVVGLDAVVEYNVFIWH

SEQ ID NO: 5735 - protein, 20 aa, synthetic construct
  REGION 1..20: note = Synthetic
VDHVVDHAQDLVDDGPLDLD

SEQ ID NO: 5736 - protein, 20 aa, synthetic construct
  REGION 1..20: note = Synthetic
GHGFCNTLGTFSFCQCEYPC

SEQ ID NO: 5737 - protein, 28 aa, synthetic construct
  REGION 1..28: note = Synthetic
DCYGYGNGYGNGYGNGYGYGNGYGYGGY

SEQ ID NO: 5738 - protein, 42 aa, synthetic construct
  REGION 1..42: note = Synthetic
AGVGSRIGTGISTTMNARVAVLITAAILSAPVTAIALLEARR

SEQ ID NO: 5739 - protein, 42 aa, synthetic construct; identical to SEQ ID NO: 5738
  REGION 1..42: note = Synthetic

SEQ ID NO: 5740 - protein, 42 aa, synthetic construct; identical to SEQ ID NO: 5738
  REGION 1..42: note = Synthetic

SEQ ID NO: 5741 - protein, 42 aa, synthetic construct; identical to SEQ ID NO: 5738
  REGION 1..42: note = Synthetic

SEQ ID NO: 5742 - protein, 42 aa, synthetic construct; identical to SEQ ID NO: 5738
  REGION 1..42: note = Synthetic

SEQ ID NO: 5743 - protein, 22 aa, synthetic construct
  REGION 1..22: note = Synthetic
AAMSTYAGILTDQVLSMLKGEE

SEQ ID NO: 5744 - protein, 25 aa, synthetic construct
  REGION 1..25: note = Synthetic
YSAGRGIVDECCLRPCSVDVLLSYC

SEQ ID NO: 5745 - protein, 31 aa, synthetic construct
  REGION 1..31: note = Synthetic
HLLREVLEMARAEQMAQQAHSNRKMMEIFGK

SEQ ID NO: 5746 - protein, 27 aa, synthetic construct
  REGION 1..27: note = Synthetic
AASILQALRTMDNDECELCVNIACTGC

SEQ ID NO: 5747 - protein, 29 aa, synthetic construct
  REGION 1..29: note = Synthetic
HLLRNMIEMARIENEREQAGLNRKYLDEV

SEQ ID NO: 5748 - protein, 16 aa, synthetic construct
  REGION 1..16: note = Synthetic
LIALAGAALAAFGLLA

SEQ ID NO: 5749 - protein, 23 aa, synthetic construct
  REGION 1..23: note = Synthetic
YSAYMAKLNALRPADVPVKNHGK

SEQ ID NO: 5750 - protein, 20 aa, synthetic construct
  REGION 1..20: note = Synthetic
ECNQWCTAGCNPDTGKCDTT

SEQ ID NO: 5751 - protein, 14 aa, synthetic construct
  REGION 1..14: note = Synthetic
LFASVAALASGFLF

SEQ ID NO: 5752 - protein, 30 aa, synthetic construct
  REGION 1..30: note = Synthetic
NAMPAFGGRLVDEDIEDAANYVLSQSEKGW

SEQ ID NO: 5753 - protein, 30 aa, synthetic construct; identical to SEQ ID NO: 5752
  REGION 1..30: note = Synthetic

SEQ ID NO: 5754 - protein, 41 aa, synthetic construct
  REGION 1..41: note = Synthetic
MQDVKTYLSTAPVLATLWFGFLAGLLIEINRFFPDALVLPL

SEQ ID NO: 5755 - protein, 41 aa, synthetic construct
  REGION 1..41: note = Synthetic
MQDVKTYLSTAPVLATLWFGLLAGILIEINRFFPDALVLPY

SEQ ID NO: 5756 - protein, 39 aa, synthetic construct; identical to SEQ ID NO: 5716
  REGION 1..39: note = Synthetic

SEQ ID NO: 5757 - protein, 41 aa, synthetic construct
  REGION 1..41: note = Synthetic
GRGGSEYYGGFHQHHYDEDAPIGPRNPYTFRHGAGVNYDDY

SEQ ID NO: 5758 - protein, 28 aa, synthetic construct
  REGION 1..28: note = Synthetic
VKGCAKTCPSAKPGERVKCCSSPRCNEV

SEQ ID NO: 5759 - protein, 35 aa, synthetic construct
  REGION 1..35: note = Synthetic
AGVERLFRALVGRGCPADCPNTCDSSNKCSPGFPG

SEQ ID NO: 5760 - protein, 26 aa, synthetic construct
  REGION 1..26: note = Synthetic
CENGETCCDGWRCRYTGRAVPFMCVP

SEQ ID NO: 5761 - protein, 33 aa, synthetic construct
  REGION 1..33: note = Synthetic
DDGNAAASDLIALTIKGCCSLPPCALSNPDYCG

SEQ ID NO: 5762 - protein, 32 aa, synthetic construct
  REGION 1..32: note = Synthetic
REGCSSGGTFCGIHPGLCCSEFCFLWCITFID

SEQ ID NO: 5763 - protein, 27 aa, synthetic construct
  REGION 1..27: note = Synthetic
FYSLDSAFTTALSSAIIFLFFLINVIL

SEQ ID NO: 5764 - protein, 27 aa, synthetic construct
  REGION 1..27: note = Synthetic
FYSLDSAFTTALSSAIIFLLFLINVIL

SEQ ID NO: 5765 - protein, 41 aa, synthetic construct
  REGION 1..41: note = Synthetic
ISTFSTVGAEADCPISEAIKCVEKCKEKVEVCEPGVCKCSG

SEQ ID NO: 5766 - protein, 12 aa, synthetic construct
  REGION 1..12: note = Synthetic
AGRGCGCGANYY

SEQ ID NO: 5767 - protein, 34 aa, synthetic construct
  REGION 1..34: note = Synthetic
SAFGVGHAACAAHCIGHGYRGGYCNSKAVCTCRR

SEQ ID NO: 5768 - protein, 41 aa, synthetic construct; identical to SEQ ID NO: 5714
  REGION 1..41: note = Synthetic

SEQ ID NO: 5769 - protein, 28 aa, synthetic construct
  REGION 1..28: note = Synthetic
DEMNTVLDHLATKDFINWLIQTKITDRK

SEQ ID NO: 5770 - protein, 32 aa, synthetic construct
  REGION 1..32: note = Synthetic
RDGCSSGGTFCGIHPGLCCSEFCFLWCITFID

SEQ ID NO: 5771 - protein, 23 aa, synthetic construct
  REGION 1..23: note = Synthetic
AARTAASWAQEALRYGTLHSDEL

SEQ ID NO: 5772 - protein, 36 aa, synthetic construct
  REGION 1..36: note = Synthetic
GTGAFRFGRGYALAKTLVFNITSGDAVVEYNVYIWH

SEQ ID NO: 5773 - protein, 23 aa, synthetic construct
  REGION 1..23: note = Synthetic
NKCSQAANNAATKFDVSKCDEQA

SEQ ID NO: 5774 - protein, 17 aa, synthetic construct
  REGION 1..17: note = Synthetic
AAKDFVSWLKAGRGRRE

SEQ ID NO: 5775 - protein, 42 aa, synthetic construct
  REGION 1..42: note = Synthetic
YHGGQGYAKGGLGCSYGCGLSGYGYACYCPWCYERSWFSGCF

SEQ ID NO: 5776 - protein, 14 aa, synthetic construct
  REGION 1..14: note = Synthetic
IIAAYTAYYGPIPY

SEQ ID NO: 5777 - protein, 35 aa, synthetic construct; identical to SEQ ID NO: 5696
  REGION 1..35: note = Synthetic

SEQ ID NO: 5778 - protein, 28 aa, synthetic construct
  REGION 1..28: note = Synthetic
VSLFEGAGNTAQVGAGALVAAVAAALLL

SEQ ID NO: 5779 - protein, 41 aa, synthetic construct
  REGION 1..41: note = Synthetic
ISTFSTVGAEADCPISEAIKCVEKCNQKVEVCEPGVCKCSG

SEQ ID NO: 5780 - protein, 18 aa, synthetic construct
  REGION 1..18: note = Synthetic
ACLGDYCECLRWEGGISI

SEQ ID NO: 5781 - protein, 22 aa, synthetic construct
  REGION 1..22: note = Synthetic
ARAEQIAQQAHSNRKLMDIIGK

SEQ ID NO: 5782 - protein, 40 aa, synthetic construct
  REGION 1..40: note = Synthetic
TGCTCGSACGSWDVRAETTCHCQCAGMDWTGARCCRLHIQ

SEQ ID NO: 5783 - protein, 12 aa, synthetic construct
  REGION 1..12: note = Synthetic
GGEFLEAGGGVR

SEQ ID NO: 5784 - protein, 17 aa, synthetic construct
  REGION 1..17: note = Synthetic
IPAFFASVATLAFGFLF

SEQ ID NO: 5785 - protein, 31 aa, synthetic construct
  REGION 1..31: note = Synthetic
HLLREVLEMARAEQLVQQAHSNRKMMEIFGK

SEQ ID NO: 5786 - protein, 20 aa, synthetic construct
  REGION 1..20: note = Synthetic
GTGCDSGNQCCSGWCIFVCL

SEQ ID NO: 5787 - protein, 28 aa, synthetic construct
  REGION 1..28: note = Synthetic
TGLSTGATSLSLGLQLLLGLLLLLQYWL

SEQ ID NO: 5788 - protein, 27 aa, synthetic construct
  REGION 1..27: note = Synthetic
LGQQGWSAWSTWHYCSGYLPPIDDCFV

SEQ ID NO: 5789 - protein, 33 aa, synthetic construct
  REGION 1..33: note = Synthetic
VFGICADGFACVPLVGERDSQDPEIVGTCVKIP

SEQ ID NO: 5790 - protein, 38 aa, synthetic construct
  REGION 1..38: note = Synthetic
RNAAAKASGLVSLTDRRPECCSDPRCNSSHPELCGGRR

SEQ ID NO: 5791 - protein, 28 aa, synthetic construct
  REGION 1..28: note = Synthetic
GAHALQPAAAILALLPALGLLLWGPGQL

SEQ ID NO: 5792 - protein, 13 aa, synthetic construct
  REGION 1..13: note = Synthetic
AVAAGLLALGAFM

SEQ ID NO: 5793 - protein, 28 aa, synthetic construct
  REGION 1..28: note = Synthetic
VGNFGSAVCAGRVEVEGGVKHCHCYGTS

SEQ ID NO: 5794 - protein, 38 aa, synthetic construct
  REGION 1..38: note = Synthetic
RNAAAKASGLVGLTDRRPECCSDPRCNSTHPELCGGRR

SEQ ID NO: 5795 - protein, 38 aa, synthetic construct; identical to SEQ ID NO: 5794
  REGION 1..38: note = Synthetic

SEQ ID NO: 5796 - protein, 20 aa, synthetic construct
  REGION 1..20: note = Synthetic
AIPEYIARAVAYNLAHSAKV

SEQ ID NO: 5797 - protein, 24 aa, synthetic construct
  REGION 1..24: note = Synthetic
AAHCIARGNRGGYCNSQKVCVCRN

SEQ ID NO: 5798 - protein, 21 aa, synthetic construct
  REGION 1..21: note = Synthetic
LAIMSEAIAKVVLENKHKSSE

SEQ ID NO: 5799 - protein, 31 aa, synthetic construct
  REGION 1..31: note = Synthetic
SAATSLLSGFRTAATFSLATALVFAASFFLL

SEQ ID NO: 5800 - protein, 36 aa, synthetic construct
  REGION 1..36: note = Synthetic
GRNAAAKASDLVSLTDKKRGCCSDPRCNYDHPEICG

SEQ ID NO: 5801 - protein, 23 aa, synthetic construct
  REGION 1..23: note = Synthetic
YIALMAALLASVLAIRLGATLYQ

SEQ ID NO: 5802 - protein, 28 aa, synthetic construct
  REGION 1..28: note = Synthetic
AVKKYLAAVLGKRYKQRIKNKGRRVAYL

SEQ ID NO: 5803 - protein, 24 aa, synthetic construct
  REGION 1..24: note = Synthetic
IYGGCGGNANNFITKEECESTCAA

SEQ ID NO: 5804 - protein, 17 aa, synthetic construct
  REGION 1..17: note = Synthetic
QCADPVSKIVYEAPYEE

SEQ ID NO: 5805 - protein, 33 aa, synthetic construct
  REGION 1..33: note = Synthetic
GLQAIQGCAETCPVPEPDQEVKCCKTDYCNSYF

SEQ ID NO: 5806 - protein, 22 aa, synthetic construct
  REGION 1..22: note = Synthetic
ARAEQLAQQAHSNRKLMEIIGK

SEQ ID NO: 5807 - protein, 22 aa, synthetic construct
  REGION 1..22: note = Synthetic
ARAEQLAQQAHSNRKLMEIIGK

SEQ ID NO: 5808 - protein, 22 aa, synthetic construct
  REGION 1..22: note = Synthetic
ARAEQLAQQAHSNRKLMEIIGK

SEQ ID NO: 5809 - protein, 22 aa, synthetic construct
  REGION 1..22: note = Synthetic
ARAEQLAQQAHSNRKLMEIIGK

SEQ ID NO: 5810 - protein, 22 aa, synthetic construct
  REGION 1..22: note = Synthetic
ARAEQLAQQAHSNRKLMEIIGK

SEQ ID NO: 5811 - protein, 35 aa, synthetic construct
  REGION 1..35: note = Synthetic
GRDAAAKASGLVGLTDRRGCCSHPACNVDHPEICG

SEQ ID NO: 5812 - protein, 41 aa, synthetic construct
  REGION 1..41: note = Synthetic
IAKAVACAKHIVSEQGITAWVAWKSHCRDHDVSSYVEGCSL

SEQ ID NO: 5813 - protein, 41 aa, synthetic construct
  REGION 1..41: note = Synthetic
ISTFSTVGAEGDCPISEAIKCVEKCKEKVEVCEPGVCKCSG

SEQ ID NO: 5814 - protein, 19 aa, synthetic construct
  REGION 1..19: note = Synthetic
MDGYVDSIEDLKMVEPIGN

SEQ ID NO: 5815 - protein, 42 aa, synthetic construct
  REGION 1..42: note = Synthetic
LNSCHSACKSCMCTRSMPGKCRCLDTTDYCYKSCKSSGEDDD

SEQ ID NO: 5816 - protein, 38 aa, synthetic construct
  REGION 1..38: note = Synthetic
MLSIFETVAAAAPVTVAETQQASNNENRGQPGYYCLIA

SEQ ID NO: 5817 - protein, 16 aa, synthetic construct
  REGION 1..16: note = Synthetic
AGAFGAAIAAGVAFLF

SEQ ID NO: 5818 - protein, 24 aa, synthetic construct
  REGION 1..24: note = Synthetic
GNGGGSCFQIVNLKSCLCAFPCQV

SEQ ID NO: 5819 - protein, 33 aa, synthetic construct
  REGION 1..33: note = Synthetic
CGNNGGNCARSGICCNHESCTMDPACEQDSVFS

SEQ ID NO: 5820 - protein, 35 aa, synthetic construct
  REGION 1..35: note = Synthetic
FEPCEAGFENCCSKSCFEFEDVYVCGVSIDYYDSR

SEQ ID NO: 5821 - protein, 31 aa, synthetic construct
  REGION 1..31: note = Synthetic
HLLREVLEMARAEQLAQQAHSNRKMMEIFGK

SEQ ID NO: 5822 - protein, 34 aa, synthetic construct
  REGION 1..34: note = Synthetic
EALEDFEKAAGARGLSTESILIPRQSETCSPGSD

SEQ ID NO: 5823 - protein, 41 aa, synthetic construct
  REGION 1..41: note = Synthetic
GLGVLGGYGGYGYGLGLGAYGYGGYGLGYGLGLGLGHGKIW

SEQ ID NO: 5824 - protein, 22 aa, synthetic construct
  REGION 1..22: note = Synthetic
VALVSALITSFLAVRLGLALYD

SEQ ID NO: 5825 - protein, 30 aa, synthetic construct
  REGION 1..30: note = Synthetic
LAYGSRGAGGVIPPNAVLDFDVELVDIARN

SEQ ID NO: 5826 - protein, 28 aa, synthetic construct
  REGION 1..28: note = Synthetic
AVKKYLAAVLGKRYKQRVKNKGRRIAYL

SEQ ID NO: 5827 - protein, 28 aa, synthetic construct
  REGION 1..28: note = Synthetic
CDYYKGCCSGYVCSPTWKWCVRPGPGRR

SEQ ID NO: 5828 - protein, 28 aa, synthetic construct
  REGION 1..28: note = Synthetic
CDYYKGCCSGYVCSPTWKWCVRPGPGRR

SEQ ID NO: 5829 - protein, 15 aa, synthetic construct
  REGION 1..15: note = Synthetic
LGGACCGTCTDYECH

SEQ ID NO: 5830 - protein, 40 aa, synthetic construct
  REGION 1..40: note = Synthetic
DLIRAALEDADMENDPRSIIDSVKTFCCSTFNLGICCSKK

SEQ ID NO: 5831 - protein, 28 aa, synthetic construct
  REGION 1..28: note = Synthetic
AVKKYLAAVLGKRYKQRVKNKGRRIAYL

SEQ ID NO: 5832 - protein, 27 aa, synthetic construct
  REGION 1..27: note = Synthetic
CDRVAAHCFAASPYNNNNYNIDTTTRC

SEQ ID NO: 5833 - protein, 28 aa, synthetic construct
  REGION 1..28: note = Synthetic
VKGCAETCPTAGPNERVKCCRSPRCNDD

SEQ ID NO: 5834 - protein, 40 aa, synthetic construct
  REGION 1..40: note = Synthetic
GGSGGSGGNDGNDGNDGSSSRGVKLYAYDYYKDDKKGSND

SEQ ID NO: 5835 - protein, 28 aa, synthetic construct
  REGION 1..28: note = Synthetic
AVKKYLAAVLGKRYKQRVKNKGRRIPYL

SEQ ID NO: 5836 - protein, 13 aa, synthetic construct
  REGION 1..13: note = Synthetic
CTDCAQTAAANYC

SEQ ID NO: 5837 - protein, 22 aa, synthetic construct
  REGION 1..22: note = Synthetic
AAVRIYTGILTDQILSMLTGDP

SEQ ID NO: 5838 - protein, 13 aa, synthetic construct
  REGION 1..13: note = Synthetic
AGALLAGAAALLL

SEQ ID NO: 5839 - protein, 23 aa, synthetic construct
  REGION 1..23: note = Synthetic
GFCGSGDAYCGAGSCQSQCRGCR

SEQ ID NO: 5840 - protein, 18 aa, synthetic construct
  REGION 1..18: note = Synthetic
EVAKMAAELAREDAVNGK

SEQ ID NO: 5841 - protein, 36 aa, synthetic construct
  REGION 1..36: note = Synthetic
LGYGSRGAGSVIPPDADLIFETELVDIQREAVDDEL

SEQ ID NO: 5842 - protein, 32 aa, synthetic construct
  REGION 1..32: note = Synthetic
WGDNGCSLWGSCTVDAECCLGNCGGMYCSLLR

SEQ ID NO: 5843 - protein, 24 aa, synthetic construct
  REGION 1..24: note = Synthetic
ARGCGTSCPGGNHPVCCSTDLCNK

SEQ ID NO: 5844 - protein, 24 aa, synthetic construct
  REGION 1..24: note = Synthetic
ARGCGTSCPGGNHPVCCSTDLCNK

SEQ ID NO: 5845 - protein, 18 aa, synthetic construct
  REGION 1..18: note = Synthetic
CGVGTGAADKAIPRDKGK

SEQ ID NO: 5846 - protein, 33 aa, synthetic construct
  REGION 1..33: note = Synthetic
RNCGEQGEGCATRPCCAGLSCVGSRPGGLCQYD

SEQ ID NO: 5847 - protein, 24 aa, synthetic construct
  REGION 1..24: note = Synthetic
YGGYGGNGNRFPTEKACMKRCVKA

SEQ ID NO: 5848 - protein, 13 aa, synthetic construct
  REGION 1..13: note = Synthetic
AGALLAGAAALLL

SEQ ID NO: 5849 - protein, 30 aa, synthetic construct
  REGION 1..30: note = Synthetic
GYGKGGGGGGGGGGGGGGGGGGSGYVGKHE

SEQ ID NO: 5850 - protein, 21 aa, synthetic construct
  REGION 1..21: note = Synthetic
IKTAEKAAKEADQIVMIKTTD

SEQ ID NO: 5851 - protein, 28 aa, synthetic construct
  REGION 1..28: note = Synthetic
AVKKYLAAVLGKRYKQRVKNKGRRIAYL

SEQ ID NO: 5852 - protein, 32 aa, synthetic construct
  REGION 1..32: note = Synthetic
AALTAASGYLSWNDKNCGLLHYFICQTQSRGG

SEQ ID NO: 5853 - protein, 23 aa, synthetic construct
  REGION 1..23: note = Synthetic
AFLGALLSKIFGKRSLRDVDTMK

SEQ ID NO: 5854 - protein, 31 aa, synthetic construct
  REGION 1..31: note = Synthetic
ASCVADGGRSARCCTLSLLGLALVCTDPVGI

SEQ ID NO: 5855 - protein, 14 aa, synthetic construct
  REGION 1..14: note = Synthetic
CVTGAPGCVGGGRL

SEQ ID NO: 5856 - protein, 38 aa, synthetic construct
  REGION 1..38: note = Synthetic
GAVKFGGDVCAAGSVSIAGKCACGCGEYGYGLGAPYLY

SEQ ID NO: 5857 - protein, 30 aa, synthetic construct
  REGION 1..30: note = Synthetic
SYGANCIAYGDTAICECPFGYSGIRCQDPS

SEQ ID NO: 5858 - protein, 11 aa, synthetic construct
  REGION 1..11: note = Synthetic
GGGYYGGYNGY

SEQ ID NO: 5859 - protein, 34 aa, synthetic construct; identical to SEQ ID NO: 5822
  REGION 1..34: note = Synthetic

SEQ ID NO: 5860 - protein, 35 aa, synthetic construct
  REGION 1..35: note = Synthetic
AGVERLFRALVGRGCPADCPNTCDSSNECSPNFPG

SEQ ID NO: 5861 - protein, 40 aa, synthetic construct
  REGION 1..40: note = Synthetic
QSGQKACGSGGRCAVLGLCCSPDGCHADPACDAEATFSQR

SEQ ID NO: 5862 - protein, 38 aa, synthetic construct
  REGION 1..38: note = Synthetic
AGGGGGDAPAAAAEEPKKEEKSEEESDEELGFSLFDDN

SEQ ID NO: 5863 - protein, 17 aa, synthetic construct
  REGION 1..17: note = Synthetic
EGGSGVASPAQADKAEL

SEQ ID NO: 5864 - protein, 41 aa, synthetic construct
  REGION 1..41: note = Synthetic
GERCCKSGCGRFCIPGLQPLQQLKDSNLTDGFNSKLEAQAP

SEQ ID NO: 5865 - protein, 40 aa, synthetic construct
  REGION 1..40: note = Synthetic
GCGCCGGCGGCGCGCGGCGGCGCCGGCGGCGCGCGGCGCC

SEQ ID NO: 5866 - protein, 19 aa, synthetic construct
  REGION 1..19: note = Synthetic
NKAYEFANDAISSVYCEKP

SEQ ID NO: 5867 - protein, 35 aa, synthetic construct
  REGION 1..35: note = Synthetic
AGGSALYTYGDWLVILAGWSLFVSIFIVIEITRGR

SEQ ID NO: 5868 - protein, 29 aa, synthetic construct
  REGION 1..29: note = Synthetic
MNEAKSLFTTFLILAFLLFLLYAFYEAAF

SEQ ID NO: 5869 - protein, 38 aa, synthetic construct; identical to SEQ ID NO: 5856
  REGION 1..38: note = Synthetic

SEQ ID NO: 5870 - protein, 39 aa, synthetic construct
  REGION 1..39: note = Synthetic
GAVKFGGDVCAAGSVSIAGKCACGCGEGYGYGLGSPYLY

SEQ ID NO: 5871 - protein, 28 aa, synthetic construct
  REGION 1..28: note = Synthetic
AVKKYLAAVLGKRYKQRVKNKGRRIAYL

SEQ ID NO: 5872 - protein, 28 aa, synthetic construct
  REGION 1..28: note = Synthetic
ELAQALASNCGASLPVDASPTVDCTTVG

SEQ ID NO: 5873 - protein, 40 aa, synthetic construct
  REGION 1..40: note = Synthetic
GAVKFGGDVCAAGSVSIAGKCACGCGDYGYGYGLGAPYLY

SEQ ID NO: 5874 - protein, 28 aa, synthetic construct
  REGION 1..28: note = Synthetic
AVKKYLAAVLGKRYKQRVKNKGRRIPYL

SEQ ID NO: 5875 - protein, 34 aa, synthetic construct
  REGION 1..34: note = Synthetic
GRYSSMASGFRSSEHKNAYENVLEEEGRVRSTPM

SEQ ID NO: 5876 - protein, 34 aa, synthetic construct
  REGION 1..34: note = Synthetic
GRYSSMASGFRSSEHKNAFENVLEEEGRVRSTPM

SEQ ID NO: 5877 - protein, 17 aa, synthetic construct
  REGION 1..17: note = Synthetic
TAGQEGFKPVGAHIPVA

SEQ ID NO: 5878 - protein, 39 aa, synthetic construct
  REGION 1..39: note = Synthetic
GAVKFGGDVCAAGSVSIAGKCDCGCGEVYGYGLGAPYLY

SEQ ID NO: 5879 - protein, 39 aa, synthetic construct; identical to SEQ ID NO: 5878
  REGION 1..39: note = Synthetic

SEQ ID NO: 5880 - protein, 17 aa, synthetic construct
  REGION 1..17: note = Synthetic
CNTGNQCCSGWCIFLCL

SEQ ID NO: 5881 - protein, 32 aa, synthetic construct
  REGION 1..32: note = Synthetic
RDGCSSGGTFCGIRPGLCCSEFCFLWCITFID

SEQ ID NO: 5882 - protein, 29 aa, synthetic construct
  REGION 1..29: note = Synthetic
AAPGHALLSSVTLGLATSLSLLTVMALCL

SEQ ID NO: 5883 - protein, 16 aa, synthetic construct
  REGION 1..16: note = Synthetic
NNGGEFARGFNEEEIF

SEQ ID NO: 5884 - protein, 36 aa, synthetic construct
  REGION 1..36: note = Synthetic
LAYGKQGAGRVIPPDSTLIFTTELVSIDNDGDRDEL

SEQ ID NO: 5885 - protein, 41 aa, synthetic construct
  REGION 1..41: note = Synthetic
EACKNAAENGDFSIYVGAQFGRFEIWSKDSGNPAILHTYYK

SEQ ID NO: 5886 - protein, 13 aa, synthetic construct
  REGION 1..13: note = Synthetic
VGGEFLAEGGGVR

SEQ ID NO: 5887 - protein, 13 aa, synthetic construct
  REGION 1..13: note = Synthetic
VGGEFLAEGGGVR

SEQ ID NO: 5888 - protein, 13 aa, synthetic construct
  REGION 1..13: note = Synthetic
VGGEFLAEGGGVR

SEQ ID NO: 5889 - protein, 28 aa, synthetic construct
  REGION 1..28: note = Synthetic
AGAGVEAGAGAETVSSSLMIFSSFFLYN

SEQ ID NO: 5890 - protein, 36 aa, synthetic construct
  REGION 1..36: note = Synthetic
AAAAAKAAADTAAAAAKAAADTAAAAAEAAAATARG

SEQ ID NO: 5891 - protein, 23 aa, synthetic construct
  REGION 1..23: note = Synthetic
GGYGGGYGLGNGGYGGCGCGWGY

SEQ ID NO: 5892 - protein, 36 aa, synthetic construct
  REGION 1..36: note = Synthetic
GRNAAAKASGLVGLTDKRQECCSYPACNLDHPELCG

SEQ ID NO: 5893 - protein, 36 aa, synthetic construct; identical to SEQ ID NO: 5892
  REGION 1..36: note = Synthetic

SEQ ID NO: 5894 - protein, 39 aa, synthetic construct
  REGION 1..39: note = Synthetic
TGCTCGSACGSWDVRAETTCHCQCAGMDWTGARCCRVQP

SEQ ID NO: 5895 - protein, 42 aa, synthetic construct
  REGION 1..42: note = Synthetic
GGLGGGQGGGGGLGGGRGGGGYGGGGGGYGGGKYGGGKYGGK

SEQ ID NO: 5896 - protein, 42 aa, synthetic construct
  REGION 1..42: note = Synthetic
GGLGGGQGGGGGLGGGRGGGGYGGGGGGYGGGKYGGGKYGRK

SEQ ID NO: 5897 - protein, 17 aa, synthetic construct
  REGION 1..17: note = Synthetic
CDSGIQCCSGWCIFVCL

SEQ ID NO: 5898 - protein, 42 aa, synthetic construct
  REGION 1..42: note = Synthetic
IDSAYSIWASAGVANPGGNKDCVGIAARVEKTENPIACTYSS

SEQ ID NO: 5899 - protein, 34 aa, synthetic construct
  REGION 1..34: note = Synthetic
GKYSSMAASFRSSEHENAYENIPEEEGKVCSTPM

SEQ ID NO: 5900 - protein, 36 aa, synthetic construct
  REGION 1..36: note = Synthetic
AQGGGATCPGGLCCSQWGWCGSTPKYCGAGCQSNCR

SEQ ID NO: 5901 - protein, 29 aa, synthetic construct
  REGION 1..29: note = Synthetic
DCDAIAAKCFARAPYNDANWDIDTETRCQ

SEQ ID NO: 5902 - protein, 36 aa, synthetic construct
  REGION 1..36: note = Synthetic
AQGGGATCPGGLCCSQWGWCGSTPKYCGAGCQSNCK

SEQ ID NO: 5903 - protein, 17 aa, synthetic construct
  REGION 1..17: note = Synthetic
CDSGIQCCSGWCIFVCF

SEQ ID NO: 5904 - protein, 12 aa, synthetic construct
  REGION 1..12: note = Synthetic
GGEFLAEGGGVR

SEQ ID NO: 5905 - protein, 26 aa, synthetic construct
  REGION 1..26: note = Synthetic
QVLSAVSTVCSCVTTSGCAAAAAATA

SEQ ID NO: 5906 - protein, 16 aa, synthetic construct
  REGION 1..16: note = Synthetic
AVVAAWAAVAAVAAFY

SEQ ID NO: 5907 - protein, 36 aa, synthetic construct
  REGION 1..36: note = Synthetic
TVIGVGGSGCSAQTVCCENTQFNGLINIGCTPINIL

SEQ ID NO: 5908 - protein, 41 aa, synthetic construct
  REGION 1..41: note = Synthetic
VAEMYSYGGGMLVICAWVLLLTLFVVLELTRGLSRGTIRAV

SEQ ID NO: 5909 - protein, 36 aa, synthetic construct
  REGION 1..36: note = Synthetic
FGAGYGGGYGLGYGGYGGGYGLGYGGYGGCGCGCGY

SEQ ID NO: 5910 - protein, 24 aa, synthetic construct
  REGION 1..24: note = Synthetic
QLYSALANKCCHVGCTKRSLARFC

SEQ ID NO: 5911 - protein, 12 aa, synthetic construct
  REGION 1..12: note = Synthetic
VGGGGGGGGGGA

SEQ ID NO: 5912 - protein, 17 aa, synthetic construct
  REGION 1..17: note = Synthetic
CNTGNQCCSGWCIFVCL

SEQ ID NO: 5913 - protein, 17 aa, synthetic construct
  REGION 1..17: note = Synthetic
CNTGNQCCSGWCIFVCL

SEQ ID NO: 5914 - protein, 34 aa, synthetic construct
  REGION 1..34: note = Synthetic
GRYSSVAASFRSSEHENAYENVPEEEGKVRSTPM

SEQ ID NO: 5915 - protein, 33 aa, synthetic construct
  REGION 1..33: note = Synthetic
AAAAAALTAANAKAAAELTAANAAAAAAATARG

SEQ ID NO: 5916 - protein, 41 aa, synthetic construct
  REGION 1..41: note = Synthetic
MKDFTTYLSTAPVLTLVSLTAVAGLLIEINRFFPDALTAAF

SEQ ID NO: 5917 - protein, 28 aa, synthetic construct
  REGION 1..28: note = Synthetic
SSGNKGGAAGLGFIMWLGVSLVMMMFLI

SEQ ID NO: 5918 - protein, 12 aa, synthetic construct
  REGION 1..12: note = Synthetic
GGEFLAEGGGVR

SEQ ID NO: 5919 - protein, 38 aa, synthetic construct
  REGION 1..38: note = Synthetic
DLIRAALEDADTKNDPRLLDYVTGACCAGLNFVCCGKK

SEQ ID NO: 5920 - protein, 20 aa, synthetic construct
  REGION 1..20: note = Synthetic
CKKAGHKGGTCDFFKCKCKV

SEQ ID NO: 5921 - protein, 34 aa, synthetic construct
  REGION 1..34: note = Synthetic
GRYSSMAASFRSSEHENAYENVPEEEGKVRSTPM

SEQ ID NO: 5922 - protein, 14 aa, synthetic construct
  REGION 1..14: note = Synthetic
ADNAAAAAAATARG

SEQ ID NO: 5923 - protein, 11 aa, synthetic construct
  REGION 1..11: note = Synthetic
VGGGGGGGGGA

SEQ ID NO: 5924 - protein, 11 aa, synthetic construct
  REGION 1..11: note = Synthetic
VGGGGGGGGGA

SEQ ID NO: 5925 - protein, 34 aa, synthetic construct
  REGION 1..34: note = Synthetic
CGSGGRCAATGICCSPDGCRTDPACDPESAFSER

SEQ ID NO: 5926 - protein, 20 aa, synthetic construct
  REGION 1..20: note = Synthetic
CKKAGHRGGTCEFFKCKCKV

SEQ ID NO: 5927 - protein, 23 aa, synthetic construct
  REGION 1..23: note = Synthetic
SCVNFGNGFCGDNCGNSWACSGC

SEQ ID NO: 5928 - protein, 22 aa, synthetic construct
  REGION 1..22: note = Synthetic
ITSAGSSVTAYLQYRRGDQLDI

SEQ ID NO: 5929 - protein, 36 aa, synthetic construct
  REGION 1..36: note = Synthetic
NGVSLLSACGGWELIFSGWILFLTIFVVLEVTRGEH

SEQ ID NO: 5930 - protein, 34 aa, synthetic construct
  REGION 1..34: note = Synthetic
CGSGGRCATAGICCSPDGCRTDPACDPESAFSER

SEQ ID NO: 5931 - protein, 34 aa, synthetic construct
  REGION 1..34: note = Synthetic
CGSGGRCAAAGICCSPDGCHADPACDPEAAFSQH

SEQ ID NO: 5932 - protein, 34 aa, synthetic construct
  REGION 1..34: note = Synthetic
CGSGGRCAAAGICCSPDGCHEDPACDPEAAFSQH

SEQ ID NO: 5933 - protein, 39 aa, synthetic construct
  REGION 1..39: note = Synthetic
AAASAGIRPGRYEQAAVIGYDLDASYNGHSRGGYGRGGY

SEQ ID NO: 5934 - protein, 29 aa, synthetic construct
  REGION 1..29: note = Synthetic
ECDAIAAKCFAKAPYNDANWDIDTETRCQ

SEQ ID NO: 5935 - protein, 34 aa, synthetic construct
  REGION 1..34: note = Synthetic
GKYSSMAASFRSNEHENAYENTSEEEGRVHSTPM

SEQ ID NO: 5936 - protein, 29 aa, synthetic construct
  REGION 1..29: note = Synthetic
ECDAIAAKCFAKAPYNDANWDIDTETRCQ

SEQ ID NO: 5937 - protein, 26 aa, synthetic construct
  REGION 1..26: note = Synthetic
QEGKDIATECCGNQCSDDYIRSACCP

SEQ ID NO: 5938 - protein, 28 aa, synthetic construct
  REGION 1..28: note = Synthetic
VATVGGLAAGGLLILFVFGSYSGLGSSL

SEQ ID NO: 5939 - protein, 20 aa, synthetic construct
  REGION 1..20: note = Synthetic
CKKAGHRGGTCDFFKCKCKV

SEQ ID NO: 5940 - protein, 35 aa, synthetic construct
  REGION 1..35: note = Synthetic
AAAAPGAAGGAQLPLGNRERKAGCKNFFWKTFSSC

SEQ ID NO: 5941 - protein, 15 aa, synthetic construct
  REGION 1..15: note = Synthetic
GIVAAYIAYYGPIQF

SEQ ID NO: 5942 - protein, 39 aa, synthetic construct
  REGION 1..39: note = Synthetic
CNTWGGNYSGGECADSSFPGLSICYCCHYVGSSAEMESM

SEQ ID NO: 5943 - protein, 11 aa, synthetic construct
  REGION 1..11: note = Synthetic
VGGGGGGGGGG

SEQ ID NO: 5944 - protein, 11 aa, synthetic construct
  REGION 1..11: note = Synthetic
VGGGGGGGGGG

SEQ ID NO: 5945 - protein, 41 aa, synthetic construct
  REGION 1..41: note = Synthetic
MTNFTTYLSTAPVVALIWFTFTAGLLIEINRFFPDPLVFSF

SEQ ID NO: 5946 - protein, 36 aa, synthetic construct
  REGION 1..36: note = Synthetic
YGGCGGNANNFETRDQCRHTCGASGNVGPRPRIASN

SEQ ID NO: 5947 - protein, 36 aa, synthetic construct
  REGION 1..36: note = Synthetic
ASDGRNAAANAKTPRLIAPFIRDYCCHRGPCMVWCG

SEQ ID NO: 5948 - protein, 36 aa, synthetic construct; identical to SEQ ID NO: 5947
  REGION 1..36: note = Synthetic

SEQ ID NO: 5949 - protein, 19 aa, synthetic construct
  REGION 1..19: note = Synthetic
VSAGVAAVAALVFGSALRI

SEQ ID NO: 5950 - protein, 17 aa, synthetic construct
  REGION 1..17: note = Synthetic
QYAAGVAALAAGALLAL

SEQ ID NO: 5951 - protein, 41 aa, synthetic construct
  REGION 1..41: note = Synthetic
GTAVGKLLTWGGLGIWWFVDLILLITGGLMPSDNSNWCTIY

SEQ ID NO: 5952 - protein, 30 aa, synthetic construct
  REGION 1..30: note = Synthetic
CDWIGTYGDACLCYALPDNVPIKLSGECHR

SEQ ID NO: 5953 - protein, 32 aa, synthetic construct
  REGION 1..32: note = Synthetic
AAAAAALTAAGAAAAAKLTAGGAAAAAAATAA

SEQ ID NO: 5954 - protein, 40 aa, synthetic construct
  REGION 1..40: note = Synthetic
AATAAAAAAATAATAAKAAALTAANAAAAAAATAAAAARG

SEQ ID NO: 5955 - protein, 18 aa, synthetic construct
  REGION 1..18: note = Synthetic
KAAVGMGAGALAAAAMLL

SEQ ID NO: 5956 - protein, 41 aa, synthetic construct
  REGION 1..41: note = Synthetic
GTAVGKLLTLGGLGIWWFVDLILLITGGLMPSDNSNWCTIY

SEQ ID NO: 5957 - protein, 35 aa, synthetic construct
  REGION 1..35: note = Synthetic
GGTGAFRFARGYALPKTYKIVGLDAVVEYNVFIWH

SEQ ID NO: 5958 - protein, 23 aa, synthetic construct
  REGION 1..23: note = Synthetic
SGAANYLTSFSIGTFFVFVLGLI

SEQ ID NO: 5959 - protein, 33 aa, synthetic construct
  REGION 1..33: note = Synthetic
CGSDGITYGNACMLLGASCRSDTPIELVHKGRC

SEQ ID NO: 5960 - protein, 18 aa, synthetic construct
  REGION 1..18: note = Synthetic
SGFASALTFGSGTKVIVL

SEQ ID NO: 5961 - protein, 18 aa, synthetic construct
  REGION 1..18: note = Synthetic
LSGAHEACKTVSCGNPCA

SEQ ID NO: 5962 - protein, 40 aa, synthetic construct
  REGION 1..40: note = Synthetic
ASDGRNAAANVKAPDLIALTVRNDCCHNAPCRNNHPGICG

SEQ ID NO: 5963 - protein, 21 aa, synthetic construct
  REGION 1..21: note = Synthetic
SGAAEGESGVASPAQADKAEL

SEQ ID NO: 5964 - protein, 12 aa, synthetic construct
  REGION 1..12: note = Synthetic
NGGSGGSNGYHY

SEQ ID NO: 5965 - protein, 31 aa, synthetic construct
  REGION 1..31: note = Synthetic
GGGGSPGHGAGGGYPGGHGGGHHGGYQTHGY

SEQ ID NO: 5966 - protein, 39 aa, synthetic construct
  REGION 1..39: note = Synthetic
LTNVQTILNGGPVTEDLRCNRVRLFVNVLDFIVQTPQIG

SEQ ID NO: 5967 - protein, 26 aa, synthetic construct
  REGION 1..26: note = Synthetic
NVGAGGCAKAGLLGILGISICADIHV

SEQ ID NO: 5968 - protein, 14 aa, synthetic construct
  REGION 1..14: note = Synthetic
GTAVAGALYAVVLA

SEQ ID NO: 5969 - protein, 41 aa, synthetic construct
  REGION 1..41: note = Synthetic
VASATSGGGGGGGAPAAESKKEEKKEEKEESDDDMGFSLFE

SEQ ID NO: 5970 - protein, 27 aa, synthetic construct
  REGION 1..27: note = Synthetic
TSGAAAGCGFMAFLEVSVAMLMFLIWL

SEQ ID NO: 5971 - protein, 40 aa, synthetic construct
  REGION 1..40: note = Synthetic
GLGAGGLQPLALEMALQKRGIVDQCCTGTCTRHQLQSYCN

SEQ ID NO: 5972 - protein, 42 aa, synthetic construct
  REGION 1..42: note = Synthetic
ATAATAAAAAAATAVTAAKAAALTAANAAAAAAATAAAAARG

SEQ ID NO: 5973 - protein, 15 aa, synthetic construct
  REGION 1..15: note = Synthetic
AVSVAAAALGGYLFC

SEQ ID NO: 5974 - protein, 30 aa, synthetic construct
  REGION 1..30: note = Synthetic
ADSAKSGAAALGVSAVVVGVTSIAGSFLLL

SEQ ID NO: 5975 - protein, 42 aa, synthetic construct
  REGION 1..42: note = Synthetic
GAGNGGNGGGGNGGNGGGGNGGNNGNGNGNNGLKKYETCYDC

SEQ ID NO: 5976 - protein, 33 aa, synthetic construct
  REGION 1..33: note = Synthetic
ATDGRNAAANARVSPVISKSSKKWCHPNPYTVG

SEQ ID NO: 5977 - protein, 17 aa, synthetic construct
  REGION 1..17: note = Synthetic
LSIAGTVAAAGFFIFSL

SEQ ID NO: 5978 - protein, 41 aa, synthetic construct
  REGION 1..41: note = Synthetic
VASATSGGGGGGGASAAESKKEEKKEEKEESDDDMGFSLFE

SEQ ID NO: 5979 - protein, 40 aa, synthetic construct
  REGION 1..40: note = Synthetic
HGGGYGSGGGGGGGGGQGGGSGSGSGSGYGSGSGGGNGHH

SEQ ID NO: 5980 - protein, 40 aa, synthetic construct; identical to SEQ ID NO: 5979
  REGION 1..40: note = Synthetic

SEQ ID NO: 5981 - protein, 26 aa, synthetic construct
  REGION 1..26: note = Synthetic
EVGTGGCAKVGILGILGISICGGIHL

SEQ ID NO: 5982 - protein, 30 aa, synthetic construct
  REGION 1..30: note = Synthetic
ADSADSGAAALGVSAVVVGVTSIVGSFLFF

SEQ ID NO: 5983 - protein, 38 aa, synthetic construct
  REGION 1..38: note = Synthetic
APAAAGAAAGGAAAPAAEEKKEEEKEESDEDMGFGLFD

SEQ ID NO: 5984 - protein, 23 aa, synthetic construct
  REGION 1..23: note = Synthetic
LHALGTRCCSWDVCDHPSCTCCG

SEQ ID NO: 5985 - protein, 41 aa, synthetic construct
  REGION 1..41: note = Synthetic
GNRVKTGGTAVLINDNGEVNETIVGDNPPKFEESRKESSSN

SEQ ID NO: 5986 - protein, 20 aa, synthetic construct
  REGION 1..20: note = Synthetic
LGTCYTTGCTCNKYRVCTKD

SEQ ID NO: 5987 - protein, 25 aa, synthetic construct
  REGION 1..25: note = Synthetic
SGMSDGTSCGDTGVCQNGLCMGAGS

SEQ ID NO: 5988 - protein, 38 aa, synthetic construct
  REGION 1..38: note = Synthetic
AAAAGGASAAAGGEATEEAAEEEAAEESDDDMSFGLFD

SEQ ID NO: 5989 - protein, 39 aa, synthetic construct
  REGION 1..39: note = Synthetic
GCGSGCKCGDSCSCEKNYNTECDSCSCGSNCSCGDSCSC

SEQ ID NO: 5990 - protein, 29 aa, synthetic construct
  REGION 1..29: note = Synthetic
EQYRGGAGRGKHNQATEENVQDCGEITGW

SEQ ID NO: 5991 - protein, 38 aa, synthetic construct
  REGION 1..38: note = Synthetic
SAAAGAAGAAAGGDAAEEEKEEEAKEESDDDMGFGLFD

SEQ ID NO: 5992 - protein, 42 aa, synthetic construct
  REGION 1..42: note = Synthetic
AGAASAGGAAAAGGAAEAAPEAERAEEEKEESDDDMGFGLFD

SEQ ID NO: 5993 - protein, 27 aa, synthetic construct
  REGION 1..27: note = Synthetic
TWATTIIALLTFGLIYEWTQGGLEWAE

SEQ ID NO: 5994 - protein, 24 aa, synthetic construct
  REGION 1..24: note = Synthetic
CKKAGHNGGTCMFFKCMCVNSKMN

SEQ ID NO: 5995 - protein, 41 aa, synthetic construct
  REGION 1..41: note = Synthetic
GGAAAAGGAAAAGGAAEAAPEEAKEEEKEESDDDMGFGLFD

SEQ ID NO: 5996 - protein, 22 aa, synthetic construct
  REGION 1..22: note = Synthetic
AHSIAHSAAYPAYTAPLTYAAP

SEQ ID NO: 5997 - protein, 39 aa, synthetic construct
  REGION 1..39: note = Synthetic
VAAAAPAAGGAAPAAEAKKEEKVEEKEESDDDMGFSLFD

SEQ ID NO: 5998 - protein, 33 aa, synthetic construct
  REGION 1..33: note = Synthetic
SGGGGAAAPAEKKEAKKEEKEESDDDMGFSLFE

SEQ ID NO: 5999 - protein, 34 aa, synthetic construct
  REGION 1..34: note = Synthetic
SGFGVGDSACAAHCIARRNRGGYCNAKKVCVCRN

SEQ ID NO: 6000 - protein, 13 aa, synthetic construct
  REGION 1..13: note = Synthetic
ASAGAGTGSGYHY

SEQ ID NO: 6001 - protein, 31 aa, synthetic construct
  REGION 1..31: note = Synthetic
AATAATAATAATAATAATAATAATAATAATA

SEQ ID NO: 6002 - protein, 22 aa, synthetic construct
  REGION 1..22: note = Synthetic
SSWKDVVEYLLQVVNMKESAPS

SEQ ID NO: 6003 - protein, 23 aa, synthetic construct
  REGION 1..23: note = Synthetic
STLEDFLERLKTIMKEKYSKCRS

SEQ ID NO: 6004 - protein, 34 aa, synthetic construct
  REGION 1..34: note = Synthetic
KIAEKVAEKVAEAADVVKKVAQDTDGDAQAHDEL

SEQ ID NO: 6005 - protein, 34 aa, synthetic construct
  REGION 1..34: note = Synthetic
SSATTLLDKIDEAIEQSISLCMDSAELLFRCLGC

SEQ ID NO: 6006 - protein, 27 aa, synthetic construct
  REGION 1..27: note = Synthetic
REVDRLASDLQRLAKFQQHSTKHYGFL

SEQ ID NO: 6007 - protein, 35 aa, synthetic construct
  REGION 1..35: note = Synthetic
ISDMKDALEEMKRILNQFQVGNSLLFVFGRRERRC

SEQ ID NO: 6008 - protein, 25 aa, synthetic construct
  REGION 1..25: note = Synthetic
FNSIINRFHDVVNHFTKTTTTTTDV

SEQ ID NO: 6009 - protein, 17 aa, synthetic construct
  REGION 1..17: note = Synthetic
NQCWSQLTECVKNCPCL

SEQ ID NO: 6010 - protein, 26 aa, synthetic construct
  REGION 1..26: note = Synthetic
LANNLKNAAEQVAEPATHEHSGHAEL

SEQ ID NO: 6011 - protein, 23 aa, synthetic construct
  REGION 1..23: note = Synthetic
NNIFNNISRCFSYCSRTCLKRTR

SEQ ID NO: 6012 - protein, 32 aa, synthetic construct
  REGION 1..32: note = Synthetic
EVANSLNRAVHRAVREESGSRRKLLGLHKKFA

SEQ ID NO: 6013 - protein, 30 aa, synthetic construct
  REGION 1..30: note = Synthetic
VDQCKKLLKKIVDTCPGGGYDHTKDGWKSK

SEQ ID NO: 6014 - protein, 14 aa, synthetic construct
  REGION 1..14: note = Synthetic
QHCISTANTMLRKL

SEQ ID NO: 6015 - protein, 35 aa, synthetic construct
  REGION 1..35: note = Synthetic
TLLETLIKNCGDFVHMHVAERDILHEMVKIVKKKV

SEQ ID NO: 6016 - protein, 27 aa, synthetic construct
  REGION 1..27: note = Synthetic
CQHLVTAFKTWFRRASRDPQGPQGGED

SEQ ID NO: 6017 - protein, 15 aa, synthetic construct
  REGION 1..15: note = Synthetic
LSDLLKRVSDLLRSL

SEQ ID NO: 6018 - protein, 27 aa, synthetic construct
  REGION 1..27: note = Synthetic
YALSKLANVLHTAALAGRLREMGADVT

SEQ ID NO: 6019 - protein, 18 aa, synthetic construct
  REGION 1..18: note = Synthetic
VIKCFKEIIEHASQLLAS

SEQ ID NO: 6020 - protein, 14 aa, synthetic construct
  REGION 1..14: note = Synthetic
HIMSDLIQELNTCI

SEQ ID NO: 6021 - protein, 27 aa, synthetic construct
  REGION 1..27: note = Synthetic
EEFLSVVERFLQRAFGTPDEHVFQAAV

SEQ ID NO: 6022 - protein, 34 aa, synthetic construct
  REGION 1..34: note = Synthetic
EGWSSLLRTVHSVLDRSPPLLIAEIILVDDFSDK

SEQ ID NO: 6023 - protein, 25 aa, synthetic construct
  REGION 1..25: note = Synthetic
IETCIENVGELLRTNFGKDVLYEVA

SEQ ID NO: 6024 - protein, 31 aa, synthetic construct
  REGION 1..31: note = Synthetic
REIDDVARELEEMLRAAMIKAAGRERDYDWL

SEQ ID NO: 6025 - protein, 32 aa, synthetic construct
  REGION 1..32: note = Synthetic
VDDILSTMIDKFHEAFLTQDEVMYESAIDNKK

SEQ ID NO: 6026 - protein, 29 aa, synthetic construct
  REGION 1..29: note = Synthetic
ASSCFNNVNDVLRQDVEVVEYLNDLMDTF

SEQ ID NO: 6027 - protein, 30 aa, synthetic construct; identical to SEQ ID NO: 4939
  REGION 1..30: note = Synthetic

SEQ ID NO: 6028 - protein, 32 aa, synthetic construct
  REGION 1..32: note = Synthetic
LVRRLDEFLNQVNHLLVPGTSTKITWIESVCL

SEQ ID NO: 6029 - protein, 15 aa, synthetic construct
  REGION 1..15: note = Synthetic
FFYYLYSMVYTLVSF

SEQ ID NO: 6030 - protein, 12 aa, synthetic construct
  REGION 1..12: note = Synthetic
KMLSRFGRFWKK

SEQ ID NO: 6031 - protein, 12 aa, synthetic construct
  REGION 1..12: note = Synthetic
RAGRKAVKRFLK

SEQ ID NO: 6032 - protein, 11 aa, synthetic construct
  REGION 1..11: note = Synthetic
RVRRLCRGLAR

SEQ ID NO: 6033 - protein, 12 aa, synthetic construct
  REGION 1..12: note = Synthetic
RIVRKVARNLGK

SEQ ID NO: 6034 - protein, 11 aa, synthetic construct
  REGION 1..11: note = Synthetic
RCRRALRRFFA

SEQ ID NO: 6035 - protein, 12 aa, synthetic construct
  REGION 1..12: note = Synthetic
KTFWKKYRTFWK

SEQ ID NO: 6036 - protein, 12 aa, synthetic construct
  REGION 1..12: note = Synthetic
VGKILKKINKAI

SEQ ID NO: 6037 - protein, 12 aa, synthetic construct
  REGION 1..12: note = Synthetic
GRKVCAKLVKRL

SEQ ID NO: 6038 - protein, 12 aa, synthetic construct
  REGION 1..12: note = Synthetic
RLVKHWYQNCKK

SEQ ID NO: 6039 - protein, 12 aa, synthetic construct
  REGION 1..12: note = Synthetic
RGLEKYFRKLSK

SEQ ID NO: 6040 - protein, 12 aa, synthetic construct
  REGION 1..12: note = Synthetic
KRIVQRIKDFLR

SEQ ID NO: 6041 - protein, 12 aa, synthetic construct
  REGION 1..12: note = Synthetic
KRYGGFMRRVGR

SEQ ID NO: 6042 - protein, 11 aa, synthetic construct
  REGION 1..11: note = Synthetic
YKRCARLLTRL

SEQ ID NO: 6043 - protein, 11 aa, synthetic construct
  REGION 1..11: note = Synthetic
YKRCARLLTRL

SEQ ID NO: 6044 - protein, 12 aa, synthetic construct
  REGION 1..12: note = Synthetic
LYKRYGGFLRRI

SEQ ID NO: 6045 - protein, 12 aa, synthetic construct
  REGION 1..12: note = Synthetic
RKLFRVYSNFLR

SEQ ID NO: 6046 - protein, 12 aa, synthetic construct
  REGION 1..12: note = Synthetic
KAIKNLLKAVSK

SEQ ID NO: 6047 - protein, 12 aa, synthetic construct
  REGION 1..12: note = Synthetic
HLLARIWKPYKK

SEQ ID NO: 6048 - protein, 12 aa, synthetic construct
  REGION 1..12: note = Synthetic
HLLARIWKPYKK

SEQ ID NO: 6049 - protein, 11 aa, synthetic construct
  REGION 1..11: note = Synthetic
KVGRKVFSKLR

SEQ ID NO: 6050 - protein, 12 aa, synthetic construct
  REGION 1..12: note = Synthetic
RGIRPVGRFGRR

SEQ ID NO: 6051 - protein, 12 aa, synthetic construct
  REGION 1..12: note = Synthetic
WLRIARRALRFV

SEQ ID NO: 6052 - protein, 12 aa, synthetic construct
  REGION 1..12: note = Synthetic
FMKRYGGFMKKM

SEQ ID NO: 6053 - protein, 12 aa, synthetic construct
  REGION 1..12: note = Synthetic
KCFNKVTGYCRK

SEQ ID NO: 6054 - protein, 12 aa, synthetic construct
  REGION 1..12: note = Synthetic
SICRKARRLAGR

SEQ ID NO: 6055 - protein, 12 aa, synthetic construct
  REGION 1..12: note = Synthetic
SICRKARRLAGR

SEQ ID NO: 6056 - protein, 12 aa, synthetic construct
  REGION 1..12: note = Synthetic
KRYYGRILHYLK

SEQ ID NO: 6057 - protein, 12 aa, synthetic construct
  REGION 1..12: note = Synthetic
KKWVQKYISLLK

SEQ ID NO: 6058 - protein, 11 aa, synthetic construct
  REGION 1..11: note = Synthetic
RWRDVCRNFMR

SEQ ID NO: 6059 - protein, 12 aa, synthetic construct
  REGION 1..12: note = Synthetic
RRYFHRIDNFLK

SEQ ID NO: 6060 - protein, 11 aa, synthetic construct
  REGION 1..11: note = Synthetic
VKLLKRIYDKL

SEQ ID NO: 6061 - protein, 12 aa, synthetic construct
  REGION 1..12: note = Synthetic
KWVQNYMKHLGR

SEQ ID NO: 6062 - protein, 11 aa, synthetic construct
  REGION 1..11: note = Synthetic
LKTIRNGVHKI

SEQ ID NO: 6063 - protein, 11 aa, synthetic construct
  REGION 1..11: note = Synthetic
KFVKVFSRIFG

SEQ ID NO: 6064 - protein, 12 aa, synthetic construct
  REGION 1..12: note = Synthetic
ICNEGKKCCRRW

SEQ ID NO: 6065 - protein, 11 aa, synthetic construct
  REGION 1..11: note = Synthetic
IKRLQRLLQAL

SEQ ID NO: 6066 - protein, 12 aa, synthetic construct
  REGION 1..12: note = Synthetic
RRICSTYRTMYR

SEQ ID NO: 6067 - protein, 11 aa, synthetic construct
  REGION 1..11: note = Synthetic
LRNLFRKLISF

SEQ ID NO: 6068 - protein, 11 aa, synthetic construct
  REGION 1..11: note = Synthetic
EYYRRLLRVLR

SEQ ID NO: 6069 - protein, 12 aa, synthetic construct
  REGION 1..12: note = Synthetic
ARHFWSKICKPV

SEQ ID NO: 6070 - protein, 12 aa, synthetic construct
  REGION 1..12: note = Synthetic
HFWKQVLGGLRK

SEQ ID NO: 6071 - protein, 11 aa, synthetic construct
  REGION 1..11: note = Synthetic
KVHGLLKTFVR

SEQ ID NO: 6072 - protein, 12 aa, synthetic construct
  REGION 1..12: note = Synthetic
IHTLIKAGKKCL

SEQ ID NO: 6073 - protein, 11 aa, synthetic construct
  REGION 1..11: note = Synthetic
KVHGLLKTFVK

SEQ ID NO: 6074 - protein, 12 aa, synthetic construct
  REGION 1..12: note = Synthetic
RFMHSVGRVFSK

SEQ ID NO: 6075 - protein, 11 aa, synthetic construct
  REGION 1..11: note = Synthetic
KFGKNIANMCR

SEQ ID NO: 6076 - protein, 12 aa, synthetic construct
  REGION 1..12: note = Synthetic
ARHFWTKICKPV

SEQ ID NO: 6077 - protein, 12 aa, synthetic construct
  REGION 1..12: note = Synthetic
ARHFWTKICKPV

SEQ ID NO: 6078 - protein, 11 aa, synthetic construct
  REGION 1..11: note = Synthetic
IRAYLKTIRQL

SEQ ID NO: 6079 - protein, 12 aa, synthetic construct
  REGION 1..12: note = Synthetic
KKAVGGLGKLGK

SEQ ID NO: 6080 - protein, 12 aa, synthetic construct
  REGION 1..12: note = Synthetic
RFYSRVLSPLHR

SEQ ID NO: 6081 - protein, 12 aa, synthetic construct
  REGION 1..12: note = Synthetic
CRALIKRIQAMI

SEQ ID NO: 6082 - protein, 12 aa, synthetic construct
  REGION 1..12: note = Synthetic
AYGRCWHVLKKV

SEQ ID NO: 6083 - protein, 11 aa, synthetic construct
  REGION 1..11: note = Synthetic
RFKSLLQKMIH

SEQ ID NO: 6084 - protein, 11 aa, synthetic construct
  REGION 1..11: note = Synthetic
KVVKLIKNYLQ

SEQ ID NO: 6085 - protein, 11 aa, synthetic construct
  REGION 1..11: note = Synthetic
KYMSWINKVIR

SEQ ID NO: 6086 - protein, 12 aa, synthetic construct
  REGION 1..12: note = Synthetic
RECLRRGRALGR

SEQ ID NO: 6087 - protein, 11 aa, synthetic construct
  REGION 1..11: note = Synthetic
GRTAVRRFLKL

SEQ ID NO: 6088 - protein, 12 aa, synthetic construct
  REGION 1..12: note = Synthetic
VQRVVEKFLKRA

SEQ ID NO: 6089 - protein, 11 aa, synthetic construct
  REGION 1..11: note = Synthetic
KGLAKMAKAWA

SEQ ID NO: 6090 - protein, 12 aa, synthetic construct
  REGION 1..12: note = Synthetic
VKKIIEKMLKNG

SEQ ID NO: 6091 - protein, 12 aa, synthetic construct
  REGION 1..12: note = Synthetic
AREVMKACRRAF

SEQ ID NO: 6092 - protein, 12 aa, synthetic construct
  REGION 1..12: note = Synthetic
AREVMKACRRAF

SEQ ID NO: 6093 - protein, 12 aa, synthetic construct
  REGION 1..12: note = Synthetic
AREVMKACRRAF

SEQ ID NO: 6094 - protein, 12 aa, synthetic construct
  REGION 1..12: note = Synthetic
RLVSKALNMWGK

SEQ ID NO: 6095 - protein, 11 aa, synthetic construct
  REGION 1..11: note = Synthetic
KFVKNVIAGIR

SEQ ID NO: 6096 - protein, 11 aa, synthetic construct
  REGION 1..11: note = Synthetic
GKDCSKLGKKC

SEQ ID NO: 6097 - protein, 12 aa, synthetic construct
  REGION 1..12: note = Synthetic
FCKAIVKSGGKI

SEQ ID NO: 6098 - protein, 12 aa, synthetic construct
  REGION 1..12: note = Synthetic
RKLYTIMNSFCR

SEQ ID NO: 6099 - protein, 11 aa, synthetic construct
  REGION 1..11: note = Synthetic
LQKALHHLSRL

SEQ ID NO: 6100 - protein, 12 aa, synthetic construct
  REGION 1..12: note = Synthetic
ARKIPKVGHTFF

SEQ ID NO: 6101 - protein, 12 aa, synthetic construct
  REGION 1..12: note = Synthetic
KILRKISSIANS

SEQ ID NO: 6102 - protein, 12 aa, synthetic construct
  REGION 1..12: note = Synthetic
WRRALRAAAGPL

SEQ ID NO: 6103 - protein, 11 aa, synthetic construct
  REGION 1..11: note = Synthetic
DCKRACAKALK

SEQ ID NO: 6104 - protein, 11 aa, synthetic construct
  REGION 1..11: note = Synthetic
ARPVKNGCRGI

SEQ ID NO: 6105 - protein, 11 aa, synthetic construct
  REGION 1..11: note = Synthetic
CARLRHVARGI

SEQ ID NO: 6106 - protein, 12 aa, synthetic construct
  REGION 1..12: note = Synthetic
LKTAFERLCRHC

SEQ ID NO: 6107 - protein, 12 aa, synthetic construct
  REGION 1..12: note = Synthetic
AQYGKPIKNMCR

SEQ ID NO: 6108 - protein, 11 aa, synthetic construct
  REGION 1..11: note = Synthetic
AALTRALRRLQ

SEQ ID NO: 6109 - protein, 12 aa, synthetic construct
  REGION 1..12: note = Synthetic
FFRVLKKILDSL

SEQ ID NO: 6110 - protein, 12 aa, synthetic construct
  REGION 1..12: note = Synthetic
KVMRWFQAMLQR

SEQ ID NO: 6111 - protein, 12 aa, synthetic construct
  REGION 1..12: note = Synthetic
GHHFVRALVRVC

SEQ ID NO: 6112 - protein, 11 aa, synthetic construct
  REGION 1..11: note = Synthetic
MKCCRNGCGKV

SEQ ID NO: 6113 - protein, 12 aa, synthetic construct
  REGION 1..12: note = Synthetic
FQNCPRGGKRAM

SEQ ID NO: 6114 - protein, 12 aa, synthetic construct
  REGION 1..12: note = Synthetic
CRRIKQAFQGAV

SEQ ID NO: 6115 - protein, 11 aa, synthetic construct
  REGION 1..11: note = Synthetic
IKPCKSVCQRA

SEQ ID NO: 6116 - protein, 11 aa, synthetic construct
  REGION 1..11: note = Synthetic
KFIKNAVAGVR

SEQ ID NO: 6117 - protein, 12 aa, synthetic construct
  REGION 1..12: note = Synthetic
ISSARKLCGRYL

SEQ ID NO: 6118 - protein, 12 aa, synthetic construct
  REGION 1..12: note = Synthetic
CKEFLNRFYKSL

SEQ ID NO: 6119 - protein, 12 aa, synthetic construct
  REGION 1..12: note = Synthetic
KAGLQVYNKCWK

SEQ ID NO: 6120 - protein, 11 aa, synthetic construct
  REGION 1..11: note = Synthetic
RGQRVGSRVGR

SEQ ID NO: 6121 - protein, 11 aa, synthetic construct
  REGION 1..11: note = Synthetic
LRRLHHACQGA

SEQ ID NO: 6122 - protein, 11 aa, synthetic construct
  REGION 1..11: note = Synthetic
CHRCRGLVDKF

SEQ ID NO: 6123 - protein, 11 aa, synthetic construct
  REGION 1..11: note = Synthetic
LARYIQQARKA

SEQ ID NO: 6124 - protein, 11 aa, synthetic construct
  REGION 1..11: note = Synthetic
LARYIQQARKA

SEQ ID NO: 6125 - protein, 11 aa, synthetic construct
  REGION 1..11: note = Synthetic
VNRCKKCGATC

SEQ ID NO: 6126 - protein, 11 aa, synthetic construct
  REGION 1..11: note = Synthetic
HCAKRIVSGAR

SEQ ID NO: 6127 - protein, 12 aa, synthetic construct
  REGION 1..12: note = Synthetic
LKRLLQEIKTCW

SEQ ID NO: 6128 - protein, 11 aa, synthetic construct
  REGION 1..11: note = Synthetic
GISSIIKHYLK

SEQ ID NO: 6129 - protein, 12 aa, synthetic construct
  REGION 1..12: note = Synthetic
RCLSPMNHLCHK

SEQ ID NO: 6130 - protein, 11 aa, synthetic construct
  REGION 1..11: note = Synthetic
LKGLVQKGVKV

SEQ ID NO: 6131 - protein, 12 aa, synthetic construct
  REGION 1..12: note = Synthetic
NGFQLLRHAVKR

SEQ ID NO: 6132 - protein, 12 aa, synthetic construct
  REGION 1..12: note = Synthetic
NGFQLLRHAVKR

SEQ ID NO: 6133 - protein, 12 aa, synthetic construct
  REGION 1..12: note = Synthetic
RTIGATMVRLVK

SEQ ID NO: 6134 - protein, 11 aa, synthetic construct
  REGION 1..11: note = Synthetic
CGRICRDIPKG

SEQ ID NO: 6135 - protein, 12 aa, synthetic construct
  REGION 1..12: note = Synthetic
RHLARTLLTAAR

SEQ ID NO: 6136 - protein, 11 aa, synthetic construct
  REGION 1..11: note = Synthetic
QLLRGWQQMFK

SEQ ID NO: 6137 - protein, 12 aa, synthetic construct
  REGION 1..12: note = Synthetic
RGGLRYMGKLVG

SEQ ID NO: 6138 - protein, 11 aa, synthetic construct
  REGION 1..11: note = Synthetic
MKKYSQILSHF

SEQ ID NO: 6139 - protein, 12 aa, synthetic construct
  REGION 1..12: note = Synthetic
RLIGELAKEIRK

SEQ ID NO: 6140 - protein, 11 aa, synthetic construct
  REGION 1..11: note = Synthetic
LKKVIQKILDG

SEQ ID NO: 6141 - protein, 11 aa, synthetic construct
  REGION 1..11: note = Synthetic
LNLAHNILRKM

SEQ ID NO: 6142 - protein, 12 aa, synthetic construct
  REGION 1..12: note = Synthetic
KELVHTYKGCIR

SEQ ID NO: 6143 - protein, 12 aa, synthetic construct
  REGION 1..12: note = Synthetic
VQRLTRACHQAM

SEQ ID NO: 6144 - protein, 12 aa, synthetic construct
  REGION 1..12: note = Synthetic
HRACSTYRTIYR

SEQ ID NO: 6145 - protein, 12 aa, synthetic construct
  REGION 1..12: note = Synthetic
LRKALDNLARQM

SEQ ID NO: 6146 - protein, 12 aa, synthetic construct
  REGION 1..12: note = Synthetic
LNRYYASLRHYL

SEQ ID NO: 6147 - protein, 11 aa, synthetic construct
  REGION 1..11: note = Synthetic
RAVSNMLQKAR

SEQ ID NO: 6148 - protein, 11 aa, synthetic construct
  REGION 1..11: note = Synthetic
ISRIYGKWYNL

SEQ ID NO: 6149 - protein, 12 aa, synthetic construct
  REGION 1..12: note = Synthetic
FKSFWQKLFAIF

SEQ ID NO: 6150 - protein, 11 aa, synthetic construct
  REGION 1..11: note = Synthetic
RYLDWIKKIIG

SEQ ID NO: 6151 - protein, 12 aa, synthetic construct
  REGION 1..12: note = Synthetic
MKKVHALWASVC

SEQ ID NO: 6152 - protein, 11 aa, synthetic construct
  REGION 1..11: note = Synthetic
AGSAKNIWKRA

SEQ ID NO: 6153 - protein, 11 aa, synthetic construct
  REGION 1..11: note = Synthetic
RVLAQLLRVWG

SEQ ID NO: 6154 - protein, 11 aa, synthetic construct
  REGION 1..11: note = Synthetic
LNYYRNLFRNF

SEQ ID NO: 6155 - protein, 11 aa, synthetic construct
  REGION 1..11: note = Synthetic
VSQLQGLWRRF

SEQ ID NO: 6156 - protein, 11 aa, synthetic construct
  REGION 1..11: note = Synthetic
IQKIFASCWRL

SEQ ID NO: 6157 - protein, 11 aa, synthetic construct
  REGION 1..11: note = Synthetic
QAANKWGRSGR

SEQ ID NO: 6158 - protein, 11 aa, synthetic construct
  REGION 1..11: note = Synthetic
GGNVGRKMKSL

SEQ ID NO: 6159 - protein, 12 aa, synthetic construct
  REGION 1..12: note = Synthetic
YSQYLERLRRFI

SEQ ID NO: 6160 - protein, 12 aa, synthetic construct
  REGION 1..12: note = Synthetic
SALRHYINLITR

SEQ ID NO: 6161 - protein, 11 aa, synthetic construct
  REGION 1..11: note = Synthetic
MKPIQKLLAGL

SEQ ID NO: 6162 - protein, 12 aa, synthetic construct
  REGION 1..12: note = Synthetic
WGRSYCRALERL

SEQ ID NO: 6163 - protein, 12 aa, synthetic construct
  REGION 1..12: note = Synthetic
KIYNVINNLVNK

SEQ ID NO: 6164 - protein, 12 aa, synthetic construct
  REGION 1..12: note = Synthetic
LKKVIQKILDSG

SEQ ID NO: 6165 - protein, 12 aa, synthetic construct
  REGION 1..12: note = Synthetic
RSFRNGVGTGMK

SEQ ID NO: 6166 - protein, 11 aa, synthetic construct
  REGION 1..11: note = Synthetic
RACQQFLKQCQ

SEQ ID NO: 6167 - protein, 12 aa, synthetic construct
  REGION 1..12: note = Synthetic
RAAAAWYRPAGR

SEQ ID NO: 6168 - protein, 12 aa, synthetic construct
  REGION 1..12: note = Synthetic
VQKIIEKILNKG

SEQ ID NO: 6169 - protein, 12 aa, synthetic construct
  REGION 1..12: note = Synthetic
GSRILRFINSFI

SEQ ID NO: 6170 - protein, 11 aa, synthetic construct
  REGION 1..11: note = Synthetic
GGRLSRVLREL

SEQ ID NO: 6171 - protein, 11 aa, synthetic construct
  REGION 1..11: note = Synthetic
QLKKCWNNYVQ

SEQ ID NO: 6172 - protein, 11 aa, synthetic construct
  REGION 1..11: note = Synthetic
SLVKNGVKILH

SEQ ID NO: 6173 - protein, 11 aa, synthetic construct
  REGION 1..11: note = Synthetic
SLVKNGVKILH

SEQ ID NO: 6174 - protein, 11 aa, synthetic construct
  REGION 1..11: note = Synthetic
KFVNSVINTLK

SEQ ID NO: 6175 - protein, 11 aa, synthetic construct
  REGION 1..11: note = Synthetic
SMLGFIGKLFR

SEQ ID NO: 6176 - protein, 12 aa, synthetic construct
  REGION 1..12: note = Synthetic
YPKGFRGYCNGL

SEQ ID NO: 6177 - protein, 12 aa, synthetic construct
  REGION 1..12: note = Synthetic
RLLRRLEDAARQ

SEQ ID NO: 6178 - protein, 12 aa, synthetic construct
  REGION 1..12: note = Synthetic
KMYNVINNLVNK

SEQ ID NO: 6179 - protein, 11 aa, synthetic construct
  REGION 1..11: note = Synthetic
KAKNLIERFFN

SEQ ID NO: 6180 - protein, 11 aa, synthetic construct
  REGION 1..11: note = Synthetic
VKKYLNSILNG

SEQ ID NO: 6181 - protein, 11 aa, synthetic construct
  REGION 1..11: note = Synthetic
EFAQKLLKKFS

SEQ ID NO: 6182 - protein, 11 aa, synthetic construct
  REGION 1..11: note = Synthetic
MNVWGSVWRRA

SEQ ID NO: 6183 - protein, 11 aa, synthetic construct
  REGION 1..11: note = Synthetic
HLARKLLSEVR

SEQ ID NO: 6184 - protein, 11 aa, synthetic construct
  REGION 1..11: note = Synthetic
MSYLKRLCGTF

SEQ ID NO: 6185 - protein, 11 aa, synthetic construct
  REGION 1..11: note = Synthetic
KWVQKYISDLK

SEQ ID NO: 6186 - protein, 11 aa, synthetic construct
  REGION 1..11: note = Synthetic
RLQRLLQGLVG

SEQ ID NO: 6187 - protein, 11 aa, synthetic construct
  REGION 1..11: note = Synthetic
FNRAVKSLQNA

SEQ ID NO: 6188 - protein, 11 aa, synthetic construct
  REGION 1..11: note = Synthetic
VKTCWKTMSSF

SEQ ID NO: 6189 - protein, 11 aa, synthetic construct
  REGION 1..11: note = Synthetic
VKTCWKTMSSF

SEQ ID NO: 6190 - protein, 11 aa, synthetic construct
  REGION 1..11: note = Synthetic
VKTCWKTMSSF

SEQ ID NO: 6191 - protein, 11 aa, synthetic construct
  REGION 1..11: note = Synthetic
VKTCWKTMSSF

SEQ ID NO: 6192 - protein, 12 aa, synthetic construct
  REGION 1..12: note = Synthetic
LMHNLGKHLNSM

SEQ ID NO: 6193 - protein, 12 aa, synthetic construct
  REGION 1..12: note = Synthetic
LHHILSQFRACI

SEQ ID NO: 6194 - protein, 11 aa, synthetic construct
  REGION 1..11: note = Synthetic
VKALKALLGAL

SEQ ID NO: 6195 - protein, 12 aa, synthetic construct
  REGION 1..12: note = Synthetic
KAVEQIKNAFNK

SEQ ID NO: 6196 - protein, 12 aa, synthetic construct
  REGION 1..12: note = Synthetic
KAVEQIKNAFNK

SEQ ID NO: 6197 - protein, 12 aa, synthetic construct
  REGION 1..12: note = Synthetic
KAVEQIKNAFNK

SEQ ID NO: 6198 - protein, 11 aa, synthetic construct
  REGION 1..11: note = Synthetic
GVVNAISRACR

SEQ ID NO: 6199 - protein, 11 aa, synthetic construct
  REGION 1..11: note = Synthetic
GVVNAISRACR

SEQ ID NO: 6200 - protein, 11 aa, synthetic construct
  REGION 1..11: note = Synthetic
GVVNAISRACR

SEQ ID NO: 6201 - protein, 12 aa, synthetic construct
  REGION 1..12: note = Synthetic
LRDAFSRVKTFF

SEQ ID NO: 6202 - protein, 11 aa, synthetic construct
  REGION 1..11: note = Synthetic
LQKVFDRYKSY

SEQ ID NO: 6203 - protein, 11 aa, synthetic construct
  REGION 1..11: note = Synthetic
LQKVFDRYKSY

SEQ ID NO: 6204 - protein, 12 aa, synthetic construct
  REGION 1..12: note = Synthetic
CKGLGAKVHTFV

SEQ ID NO: 6205 - protein, 12 aa, synthetic construct
  REGION 1..12: note = Synthetic
RLGHNLFGIYQK

SEQ ID NO: 6206 - protein, 12 aa, synthetic construct
  REGION 1..12: note = Synthetic
GPRFGKHLLSYC

SEQ ID NO: 6207 - protein, 12 aa, synthetic construct
  REGION 1..12: note = Synthetic
LHHILSQLRACI

SEQ ID NO: 6208 - protein, 11 aa, synthetic construct
  REGION 1..11: note = Synthetic
LASGAHKLVRF

SEQ ID NO: 6209 - protein, 11 aa, synthetic construct
  REGION 1..11: note = Synthetic
LASGAHKLVRF

SEQ ID NO: 6210 - protein, 12 aa, synthetic construct
  REGION 1..12: note = Synthetic
LAQRWMERLKTV

SEQ ID NO: 6211 - protein, 12 aa, synthetic construct
  REGION 1..12: note = Synthetic
VWGHCTKMATRG

SEQ ID NO: 6212 - protein, 11 aa, synthetic construct
  REGION 1..11: note = Synthetic
WKQYKQGFGSI

SEQ ID NO: 6213 - protein, 11 aa, synthetic construct
  REGION 1..11: note = Synthetic
ASSIFKTLRTI

SEQ ID NO: 6214 - protein, 12 aa, synthetic construct
  REGION 1..12: note = Synthetic
WVAVCKQVCTRV

SEQ ID NO: 6215 - protein, 12 aa, synthetic construct
  REGION 1..12: note = Synthetic
GLLQSYLKGLGR

SEQ ID NO: 6216 - protein, 11 aa, synthetic construct
  REGION 1..11: note = Synthetic
MTKMYKGFQAL

SEQ ID NO: 6217 - protein, 12 aa, synthetic construct
  REGION 1..12: note = Synthetic
CARVFHTGGARL

SEQ ID NO: 6218 - protein, 11 aa, synthetic construct
  REGION 1..11: note = Synthetic
IKPCKSVCERA

SEQ ID NO: 6219 - protein, 11 aa, synthetic construct
  REGION 1..11: note = Synthetic
FRSFGSSYSRV

SEQ ID NO: 6220 - protein, 11 aa, synthetic construct
  REGION 1..11: note = Synthetic
LQAIRDGLRKG

SEQ ID NO: 6221 - protein, 12 aa, synthetic construct
  REGION 1..12: note = Synthetic
ATRGCRPWGSLL

SEQ ID NO: 6222 - protein, 12 aa, synthetic construct
  REGION 1..12: note = Synthetic
ATRGCRPWGSLL

SEQ ID NO: 6223 - protein, 12 aa, synthetic construct
  REGION 1..12: note = Synthetic
LGSPIEKLCKHI

SEQ ID NO: 6224 - protein, 12 aa, synthetic construct
  REGION 1..12: note = Synthetic
GPHLFGKIVNRG

SEQ ID NO: 6225 - protein, 11 aa, synthetic construct
  REGION 1..11: note = Synthetic
GVVNAMSRACR

SEQ ID NO: 6226 - protein, 11 aa, synthetic construct
  REGION 1..11: note = Synthetic
GVVNAMSRACR

SEQ ID NO: 6227 - protein, 11 aa, synthetic construct
  REGION 1..11: note = Synthetic
GVVNAMSRACR

SEQ ID NO: 6228 - protein, 12 aa, synthetic construct
  REGION 1..12: note = Synthetic
KWVQDFMKHLDK

SEQ ID NO: 6229 - protein, 12 aa, synthetic construct
  REGION 1..12: note = Synthetic
MREAGAQLKKLV

SEQ ID NO: 6230 - protein, 12 aa, synthetic construct
  REGION 1..12: note = Synthetic
QACNSAMKNINK

SEQ ID NO: 6231 - protein, 12 aa, synthetic construct
  REGION 1..12: note = Synthetic
HHYSKGFRQAAS

SEQ ID NO: 6232 - protein, 12 aa, synthetic construct
  REGION 1..12: note = Synthetic
RAIKPYQTLIKE

SEQ ID NO: 6233 - protein, 12 aa, synthetic construct
  REGION 1..12: note = Synthetic
GEVGRRGKAGLR

SEQ ID NO: 6234 - protein, 11 aa, synthetic construct
  REGION 1..11: note = Synthetic
LTQGLRQLRNA

SEQ ID NO: 6235 - protein, 11 aa, synthetic construct
  REGION 1..11: note = Synthetic
AARVARFVTHV

SEQ ID NO: 6236 - protein, 11 aa, synthetic construct
  REGION 1..11: note = Synthetic
LNQARNGGRHF

SEQ ID NO: 6237 - protein, 11 aa, synthetic construct
  REGION 1..11: note = Synthetic
WKSCTAIGGRC

SEQ ID NO: 6238 - protein, 12 aa, synthetic construct
  REGION 1..12: note = Synthetic
QIFGAVKSLWTK

SEQ ID NO: 6239 - protein, 11 aa, synthetic construct
  REGION 1..11: note = Synthetic
RAVKCGKGLAA

SEQ ID NO: 6240 - protein, 11 aa, synthetic construct
  REGION 1..11: note = Synthetic
TLIKTIVTRIN

SEQ ID NO: 6241 - protein, 11 aa, synthetic construct
  REGION 1..11: note = Synthetic
TLIKTIVTRIN

SEQ ID NO: 6242 - protein, 11 aa, synthetic construct
  REGION 1..11: note = Synthetic
TLIKTIVTRIN

SEQ ID NO: 6243 - protein, 11 aa, synthetic construct
  REGION 1..11: note = Synthetic
TLIKTIVTRIN

SEQ ID NO: 6244 - protein, 11 aa, synthetic construct
  REGION 1..11: note = Synthetic
RARAAGARGCR

SEQ ID NO: 6245 - protein, 11 aa, synthetic construct
  REGION 1..11: note = Synthetic
TAFGSGIHKIR

SEQ ID NO: 6246 - protein, 12 aa, synthetic construct
  REGION 1..12: note = Synthetic
AAGAFRGLKQLI

SEQ ID NO: 6247 - protein, 11 aa, synthetic construct
  REGION 1..11: note = Synthetic
LERLRRGLAAG

SEQ ID NO: 6248 - protein, 11 aa, synthetic construct
  REGION 1..11: note = Synthetic
AYIQSLLKRYQ

SEQ ID NO: 6249 - protein, 11 aa, synthetic construct
  REGION 1..11: note = Synthetic
IASFVKKYNTY

SEQ ID NO: 6250 - protein, 11 aa, synthetic construct
  REGION 1..11: note = Synthetic
IASFVKKYNTY

SEQ ID NO: 6251 - protein, 11 aa, synthetic construct
  REGION 1..11: note = Synthetic
LNMAKNALRNM

SEQ ID NO: 6252 - protein, 11 aa, synthetic construct
  REGION 1..11: note = Synthetic
KVGQACCRPIA

SEQ ID NO: 6253 - protein, 11 aa, synthetic construct
  REGION 1..11: note = Synthetic
FRPAARGLAQC

SEQ ID NO: 6254 - protein, 11 aa, synthetic construct
  REGION 1..11: note = Synthetic
CGRGYNQFKSV

SEQ ID NO: 6255 - protein, 12 aa, synthetic construct
  REGION 1..12: note = Synthetic
SFMQGYMKHATK

SEQ ID NO: 6256 - protein, 11 aa, synthetic construct
  REGION 1..11: note = Synthetic
VSAAFKGLKSL

SEQ ID NO: 6257 - protein, 12 aa, synthetic construct
  REGION 1..12: note = Synthetic
VKKLLEALSHLV

SEQ ID NO: 6258 - protein, 12 aa, synthetic construct
  REGION 1..12: note = Synthetic
KRLARAAEAWAT

SEQ ID NO: 6259 - protein, 12 aa, synthetic construct
  REGION 1..12: note = Synthetic
SWAAGAPRAGRR

SEQ ID NO: 6260 - protein, 12 aa, synthetic construct
  REGION 1..12: note = Synthetic
RAATVLRQFYSH

SEQ ID NO: 6261 - protein, 11 aa, synthetic construct
  REGION 1..11: note = Synthetic
QYSQALKKVFA

SEQ ID NO: 6262 - protein, 12 aa, synthetic construct
  REGION 1..12: note = Synthetic
ASWMSRLRALLG

SEQ ID NO: 6263 - protein, 11 aa, synthetic construct
  REGION 1..11: note = Synthetic
QWAHRAFAPLR

SEQ ID NO: 6264 - protein, 11 aa, synthetic construct
  REGION 1..11: note = Synthetic
GKSFIKDALKC

SEQ ID NO: 6265 - protein, 11 aa, synthetic construct
  REGION 1..11: note = Synthetic
RYHTCGGTLIR

SEQ ID NO: 6266 - protein, 12 aa, synthetic construct
  REGION 1..12: note = Synthetic
VTGVVRQWLSRG

SEQ ID NO: 6267 - protein, 12 aa, synthetic construct
  REGION 1..12: note = Synthetic
YNTYASRLYRTV

SEQ ID NO: 6268 - protein, 12 aa, synthetic construct
  REGION 1..12: note = Synthetic
FCHNILSCCKNM

SEQ ID NO: 6269 - protein, 11 aa, synthetic construct
  REGION 1..11: note = Synthetic
LRTALQHLHGV

SEQ ID NO: 6270 - protein, 11 aa, synthetic construct
  REGION 1..11: note = Synthetic
VNEILNHMKRA

SEQ ID NO: 6271 - protein, 11 aa, synthetic construct
  REGION 1..11: note = Synthetic
RMRRYADAIFT

SEQ ID NO: 6272 - protein, 12 aa, synthetic construct
  REGION 1..12: note = Synthetic
KRIIDSARSAYQ

SEQ ID NO: 6273 - protein, 11 aa, synthetic construct
  REGION 1..11: note = Synthetic
LGRWTHLCGTW

SEQ ID NO: 6274 - protein, 11 aa, synthetic construct
  REGION 1..11: note = Synthetic
RVDKLVEKILH

SEQ ID NO: 6275 - protein, 11 aa, synthetic construct
  REGION 1..11: note = Synthetic
RGMKLLGALLA

SEQ ID NO: 6276 - protein, 11 aa, synthetic construct
  REGION 1..11: note = Synthetic
GVYTKVYNYVK

SEQ ID NO: 6277 - protein, 11 aa, synthetic construct
  REGION 1..11: note = Synthetic
SWLHGLKALGH

SEQ ID NO: 6278 - protein, 11 aa, synthetic construct
  REGION 1..11: note = Synthetic
LQAAFSQYKKV

SEQ ID NO: 6279 - protein, 12 aa, synthetic construct
  REGION 1..12: note = Synthetic
KYFTLGESWLRK

SEQ ID NO: 6280 - protein, 12 aa, synthetic construct
  REGION 1..12: note = Synthetic
SFLEHLQRALRS

SEQ ID NO: 6281 - protein, 12 aa, synthetic construct
  REGION 1..12: note = Synthetic
KNIKEFLQSFVH

SEQ ID NO: 6282 - protein, 12 aa, synthetic construct
  REGION 1..12: note = Synthetic
KALNSIIDVYHK

SEQ ID NO: 6283 - protein, 12 aa, synthetic construct
  REGION 1..12: note = Synthetic
LLARGAKWGQAL

SEQ ID NO: 6284 - protein, 12 aa, synthetic construct
  REGION 1..12: note = Synthetic
GRGFITKAINSC

SEQ ID NO: 6285 - protein, 12 aa, synthetic construct
  REGION 1..12: note = Synthetic
GRGFITKAINSC

SEQ ID NO: 6286 - protein, 12 aa, synthetic construct
  REGION 1..12: note = Synthetic
GRGFITKAINSC

SEQ ID NO: 6287 - protein, 12 aa, synthetic construct
  REGION 1..12: note = Synthetic
GRAVYQSMCKPI

SEQ ID NO: 6288 - protein, 11 aa, synthetic construct
  REGION 1..11: note = Synthetic
KVISGILTQGR

SEQ ID NO: 6289 - protein, 11 aa, synthetic construct
  REGION 1..11: note = Synthetic
HLLRTLLELAR

SEQ ID NO: 6290 - protein, 12 aa, synthetic construct
  REGION 1..12: note = Synthetic
MAQFIHLFSKFY

SEQ ID NO: 6291 - protein, 11 aa, synthetic construct
  REGION 1..11: note = Synthetic
GYNAAYNRYFR

SEQ ID NO: 6292 - protein, 12 aa, synthetic construct
  REGION 1..12: note = Synthetic
RKLGSILNEFGH

SEQ ID NO: 6293 - protein, 12 aa, synthetic construct
  REGION 1..12: note = Synthetic
LGGRVCAAVTRC

SEQ ID NO: 6294 - protein, 12 aa, synthetic construct
  REGION 1..12: note = Synthetic
GMWHRAEHALQR

SEQ ID NO: 6295 - protein, 11 aa, synthetic construct
  REGION 1..11: note = Synthetic
LHHWLHRLQEA

SEQ ID NO: 6296 - protein, 12 aa, synthetic construct
  REGION 1..12: note = Synthetic
ALELARRGARVV

SEQ ID NO: 6297 - protein, 11 aa, synthetic construct
  REGION 1..11: note = Synthetic
RAAHAILGGLH

SEQ ID NO: 6298 - protein, 12 aa, synthetic construct
  REGION 1..12: note = Synthetic
ARAAWGRAGQPW

SEQ ID NO: 6299 - protein, 11 aa, synthetic construct
  REGION 1..11: note = Synthetic
DAVACAKRVVR

SEQ ID NO: 6300 - protein, 12 aa, synthetic construct
  REGION 1..12: note = Synthetic
RLASAGCSGWTR

SEQ ID NO: 6301 - protein, 11 aa, synthetic construct
  REGION 1..11: note = Synthetic
RAANALCAGMR

SEQ ID NO: 6302 - protein, 11 aa, synthetic construct
  REGION 1..11: note = Synthetic
LQLGRTMCGKF

SEQ ID NO: 6303 - protein, 11 aa, synthetic construct
  REGION 1..11: note = Synthetic
FSLGKQVGNKF

SEQ ID NO: 6304 - protein, 12 aa, synthetic construct
  REGION 1..12: note = Synthetic
GRRALSAVPAVL

SEQ ID NO: 6305 - protein, 12 aa, synthetic construct
  REGION 1..12: note = Synthetic
SVFGRVMQIGSR

SEQ ID NO: 6306 - protein, 11 aa, synthetic construct
  REGION 1..11: note = Synthetic
KVAKQVFQVAA

SEQ ID NO: 6307 - protein, 11 aa, synthetic construct
  REGION 1..11: note = Synthetic
LDTALRRARSA

SEQ ID NO: 6308 - protein, 11 aa, synthetic construct
  REGION 1..11: note = Synthetic
AIIKNAYKKGE

SEQ ID NO: 6309 - protein, 12 aa, synthetic construct
  REGION 1..12: note = Synthetic
LHAVVKNCFAVV

SEQ ID NO: 6310 - protein, 11 aa, synthetic construct
  REGION 1..11: note = Synthetic
FRRAYEAARAA

SEQ ID NO: 6311 - protein, 11 aa, synthetic construct
  REGION 1..11: note = Synthetic
KAGSRGLTSLA

SEQ ID NO: 6312 - protein, 11 aa, synthetic construct
  REGION 1..11: note = Synthetic
AACRRAYAAFS

SEQ ID NO: 6313 - protein, 11 aa, synthetic construct
  REGION 1..11: note = Synthetic
QVGQKAANALK

SEQ ID NO: 6314 - protein, 11 aa, synthetic construct
  REGION 1..11: note = Synthetic
VQKLAHQIYQF

SEQ ID NO: 6315 - protein, 11 aa, synthetic construct
  REGION 1..11: note = Synthetic
CDQCRHVVSKY

SEQ ID NO: 6316 - protein, 11 aa, synthetic construct
  REGION 1..11: note = Synthetic
CDQCRHVVSKY

SEQ ID NO: 6317 - protein, 11 aa, synthetic construct
  REGION 1..11: note = Synthetic
KVVGCARTVGN

SEQ ID NO: 6318 - protein, 11 aa, synthetic construct
  REGION 1..11: note = Synthetic
VRVLHSIGHSA

SEQ ID NO: 6319 - protein, 12 aa, synthetic construct
  REGION 1..12: note = Synthetic
GKYGKTGSAGAR

SEQ ID NO: 6320 - protein, 11 aa, synthetic construct
  REGION 1..11: note = Synthetic
RVVHAAKAALA

SEQ ID NO: 6321 - protein, 11 aa, synthetic construct
  REGION 1..11: note = Synthetic
LGVAGNIVRHI

SEQ ID NO: 6322 - protein, 11 aa, synthetic construct
  REGION 1..11: note = Synthetic
SLVSGIGRHVQ

SEQ ID NO: 6323 - protein, 12 aa, synthetic construct
  REGION 1..12: note = Synthetic
RRGVSQAPTAAR

SEQ ID NO: 6324 - protein, 12 aa, synthetic construct
  REGION 1..12: note = Synthetic
RGFPSGMGAAGR

SEQ ID NO: 6325 - protein, 12 aa, synthetic construct
  REGION 1..12: note = Synthetic
RKAIHELIQVMA

SEQ ID NO: 6326 - protein, 12 aa, synthetic construct
  REGION 1..12: note = Synthetic
RKAIHELIQVMA

SEQ ID NO: 6327 - protein, 12 aa, synthetic construct
  REGION 1..12: note = Synthetic
RKAIHELIQVMA

SEQ ID NO: 6328 - protein, 12 aa, synthetic construct
  REGION 1..12: note = Synthetic
RKAIHELIQVMA

SEQ ID NO: 6329 - protein, 12 aa, synthetic construct
  REGION 1..12: note = Synthetic
RKAIHELIQVMA

SEQ ID NO: 6330 - protein, 12 aa, synthetic construct
  REGION 1..12: note = Synthetic
RKAIHELIQVMA

SEQ ID NO: 6331 - protein, 12 aa, synthetic construct
  REGION 1..12: note = Synthetic
RKAIHELIQVMA

SEQ ID NO: 6332 - protein, 12 aa, synthetic construct
  REGION 1..12: note = Synthetic
RKAIHELIQVMA

SEQ ID NO: 6333 - protein, 12 aa, synthetic construct
  REGION 1..12: note = Synthetic
RKAIHELIQVMA

SEQ ID NO: 6334 - protein, 12 aa, synthetic construct
  REGION 1..12: note = Synthetic
RKAIHELIQVMA

SEQ ID NO: 6335 - protein, 12 aa, synthetic construct
  REGION 1..12: note = Synthetic
LRHLYTSGPHGL

SEQ ID NO: 6336 - protein, 12 aa, synthetic construct
  REGION 1..12: note = Synthetic
KAALSMCKSVVA

SEQ ID NO: 6337 - protein, 11 aa, synthetic construct
  REGION 1..11: note = Synthetic
HALAKACSAGR

SEQ ID NO: 6338 - protein, 11 aa, synthetic construct
  REGION 1..11: note = Synthetic
HALAKACSAGR

SEQ ID NO: 6339 - protein, 12 aa, synthetic construct
  REGION 1..12: note = Synthetic
SGVQKYTRALHD

SEQ ID NO: 6340 - protein, 11 aa, synthetic construct
  REGION 1..11: note = Synthetic
GKWYHTCGGSL

SEQ ID NO: 6341 - protein, 11 aa, synthetic construct
  REGION 1..11: note = Synthetic
VELLRRIYDRL

SEQ ID NO: 6342 - protein, 11 aa, synthetic construct
  REGION 1..11: note = Synthetic
VELLKRIYDRL

SEQ ID NO: 6343 - protein, 11 aa, synthetic construct
  REGION 1..11: note = Synthetic
VELLKRIYDKL

SEQ ID NO: 6344 - protein, 11 aa, synthetic construct
  REGION 1..11: note = Synthetic
VELLKRIYDKL

SEQ ID NO: 6345 - protein, 11 aa, synthetic construct
  REGION 1..11: note = Synthetic
VELLKRIYDKL

SEQ ID NO: 6346 - protein, 11 aa, synthetic construct
  REGION 1..11: note = Synthetic
VELLKRIYDKL

SEQ ID NO: 6347 - protein, 11 aa, synthetic construct
  REGION 1..11: note = Synthetic
VELLKRIYDKL

SEQ ID NO: 6348 - protein, 11 aa, synthetic construct
  REGION 1..11: note = Synthetic
DLYQLLQRLFK

SEQ ID NO: 6349 - protein, 12 aa, synthetic construct
  REGION 1..12: note = Synthetic
AACRAMWGLAAR

SEQ ID NO: 6350 - protein, 12 aa, synthetic construct
  REGION 1..12: note = Synthetic
LKEMIETLARKL

SEQ ID NO: 6351 - protein, 11 aa, synthetic construct
  REGION 1..11: note = Synthetic
KGSSGCKACVS

SEQ ID NO: 6352 - protein, 12 aa, synthetic construct
  REGION 1..12: note = Synthetic
EWIQRMMEVLRK

SEQ ID NO: 6353 - protein, 11 aa, synthetic construct
  REGION 1..11: note = Synthetic
CKGVFHAIVSG

SEQ ID NO: 6354 - protein, 12 aa, synthetic construct
  REGION 1..12: note = Synthetic
VVAKVGHLYAAW

SEQ ID NO: 6355 - protein, 12 aa, synthetic construct
  REGION 1..12: note = Synthetic
LNRWITFCQSII

SEQ ID NO: 6356 - protein, 12 aa, synthetic construct
  REGION 1..12: note = Synthetic
AAHCLKEGLKVY

SEQ ID NO: 6357 - protein, 11 aa, synthetic construct
  REGION 1..11: note = Synthetic
EIMQGFIRAFR

SEQ ID NO: 6358 - protein, 12 aa, synthetic construct
  REGION 1..12: note = Synthetic
VASRGRAVCGGV

SEQ ID NO: 6359 - protein, 11 aa, synthetic construct
  REGION 1..11: note = Synthetic
VNKYLGRWYEI

SEQ ID NO: 6360 - protein, 11 aa, synthetic construct
  REGION 1..11: note = Synthetic
GARGGARGTRY

SEQ ID NO: 6361 - protein, 11 aa, synthetic construct
  REGION 1..11: note = Synthetic
IDAFIKSIRTM

SEQ ID NO: 6362 - protein, 11 aa, synthetic construct
  REGION 1..11: note = Synthetic
LSKCAEQFCRL

SEQ ID NO: 6363 - protein, 11 aa, synthetic construct
  REGION 1..11: note = Synthetic
EALQEVLKKLK

SEQ ID NO: 6364 - protein, 11 aa, synthetic construct
  REGION 1..11: note = Synthetic
YNRLVRSLLEC

SEQ ID NO: 6365 - protein, 12 aa, synthetic construct
  REGION 1..12: note = Synthetic
LLGGVNKIAEKI

SEQ ID NO: 6366 - protein, 11 aa, synthetic construct
  REGION 1..11: note = Synthetic
YRSFSNIISTL

SEQ ID NO: 6367 - protein, 12 aa, synthetic construct
  REGION 1..12: note = Synthetic
IVTIINTLLKLV

SEQ ID NO: 6368 - protein, 12 aa, synthetic construct
  REGION 1..12: note = Synthetic
HCIHDGKTYVKG

SEQ ID NO: 6369 - protein, 12 aa, synthetic construct
  REGION 1..12: note = Synthetic
AGWGIVNHAGRR

SEQ ID NO: 6370 - protein, 12 aa, synthetic construct
  REGION 1..12: note = Synthetic
TFLKSLLEIFQK

SEQ ID NO: 6371 - protein, 12 aa, synthetic construct
  REGION 1..12: note = Synthetic
ISHAPNAVKTAF

SEQ ID NO: 6372 - protein, 11 aa, synthetic construct
  REGION 1..11: note = Synthetic
KWVQDYIKDMK

SEQ ID NO: 6373 - protein, 12 aa, synthetic construct
  REGION 1..12: note = Synthetic
WKSAVQGLLNYI

SEQ ID NO: 6374 - protein, 11 aa, synthetic construct
  REGION 1..11: note = Synthetic
VKDVTKLVANL

SEQ ID NO: 6375 - protein, 12 aa, synthetic construct
  REGION 1..12: note = Synthetic
CGSNGKTYLNHC

SEQ ID NO: 6376 - protein, 11 aa, synthetic construct
  REGION 1..11: note = Synthetic
RCLQKWFEPAQ

SEQ ID NO: 6377 - protein, 11 aa, synthetic construct
  REGION 1..11: note = Synthetic
YDTLIKDLKKA

SEQ ID NO: 6378 - protein, 11 aa, synthetic construct
  REGION 1..11: note = Synthetic
GQKACGSGGRC

SEQ ID NO: 6379 - protein, 12 aa, synthetic construct
  REGION 1..12: note = Synthetic
AKSVCRMLSDLC

SEQ ID NO: 6380 - protein, 11 aa, synthetic construct
  REGION 1..11: note = Synthetic
GGTVERLFKNL

SEQ ID NO: 6381 - protein, 12 aa, synthetic construct
  REGION 1..12: note = Synthetic
LTRWMQYLREGY

SEQ ID NO: 6382 - protein, 11 aa, synthetic construct
  REGION 1..11: note = Synthetic
AGAEVVHRYYR

SEQ ID NO: 6383 - protein, 11 aa, synthetic construct
  REGION 1..11: note = Synthetic
DVKTVLQNWLK

SEQ ID NO: 6384 - protein, 11 aa, synthetic construct
  REGION 1..11: note = Synthetic
HLFRHGVAHGQ

SEQ ID NO: 6385 - protein, 12 aa, synthetic construct
  REGION 1..12: note = Synthetic
WRSFFKEALQGV

SEQ ID NO: 6386 - protein, 11 aa, synthetic construct
  REGION 1..11: note = Synthetic
HCVALCTRGGH

SEQ ID NO: 6387 - protein, 11 aa, synthetic construct
  REGION 1..11: note = Synthetic
IHKYGASVSNG

SEQ ID NO: 6388 - protein, 12 aa, synthetic construct
  REGION 1..12: note = Synthetic
FQEAYRRFYGPV

SEQ ID NO: 6389 - protein, 12 aa, synthetic construct
  REGION 1..12: note = Synthetic
FKDALARVYGVI

SEQ ID NO: 6390 - protein, 12 aa, synthetic construct
  REGION 1..12: note = Synthetic
NMLGGGGSAGRK

SEQ ID NO: 6391 - protein, 12 aa, synthetic construct
  REGION 1..12: note = Synthetic
IVSIFNTLLKLA

SEQ ID NO: 6392 - protein, 12 aa, synthetic construct
  REGION 1..12: note = Synthetic
GGCSHGSRCLRD

SEQ ID NO: 6393 - protein, 12 aa, synthetic construct
  REGION 1..12: note = Synthetic
TWVRDVVRSMDR

SEQ ID NO: 6394 - protein, 12 aa, synthetic construct
  REGION 1..12: note = Synthetic
TWVRDVVRSMDR

SEQ ID NO: 6395 - protein, 11 aa, synthetic construct
  REGION 1..11: note = Synthetic
ALGRELASLFR

SEQ ID NO: 6396 - protein, 11 aa, synthetic construct
  REGION 1..11: note = Synthetic
YSALANKCCHV

SEQ ID NO: 6397 - protein, 11 aa, synthetic construct
  REGION 1..11: note = Synthetic
LKSMAGSGHNV

SEQ ID NO: 6398 - protein, 12 aa, synthetic construct
  REGION 1..12: note = Synthetic
IIRSFANSGNAI

SEQ ID NO: 6399 - protein, 11 aa, synthetic construct
  REGION 1..11: note = Synthetic
LKSFSTLANNF

SEQ ID NO: 6400 - protein, 12 aa, synthetic construct
  REGION 1..12: note = Synthetic
IKKAGTELVNFL

SEQ ID NO: 6401 - protein, 11 aa, synthetic construct
  REGION 1..11: note = Synthetic
FKTCWRAAPEF

SEQ ID NO: 6402 - protein, 12 aa, synthetic construct
  REGION 1..12: note = Synthetic
IVTIINTFLKLA

SEQ ID NO: 6403 - protein, 12 aa, synthetic construct
  REGION 1..12: note = Synthetic
LGGLLGKVTSVI

SEQ ID NO: 6404 - protein, 11 aa, synthetic construct
  REGION 1..11: note = Synthetic
ALLKALYGHGQ

SEQ ID NO: 6405 - protein, 12 aa, synthetic construct
  REGION 1..12: note = Synthetic
IVTIINTLLRLA

SEQ ID NO: 6406 - protein, 12 aa, synthetic construct
  REGION 1..12: note = Synthetic
IVTIFNTLLKIA

SEQ ID NO: 6407 - protein, 12 aa, synthetic construct
  REGION 1..12: note = Synthetic
IVTIINTLLKLA

SEQ ID NO: 6408 - protein, 12 aa, synthetic construct
  REGION 1..12: note = Synthetic
IVTIINTLLKLA

SEQ ID NO: 6409 - protein, 12 aa, synthetic construct
  REGION 1..12: note = Synthetic
IVTIINTLLKLA

SEQ ID NO: 6410 - protein, 12 aa, synthetic construct
  REGION 1..12: note = Synthetic
IVTIINTLLKLA

SEQ ID NO: 6411 - protein, 12 aa, synthetic construct
  REGION 1..12: note = Synthetic
IVTIINTLLKLA

SEQ ID NO: 6412 - protein, 12 aa, synthetic construct
  REGION 1..12: note = Synthetic
IVTIINTLLKLA

SEQ ID NO: 6413 - protein, 12 aa, synthetic construct
  REGION 1..12: note = Synthetic
IVTIINTLLKLA

SEQ ID NO: 6414 - protein, 11 aa, synthetic construct
  REGION 1..11: note = Synthetic
CQTVVRNIQSF

SEQ ID NO: 6415 - protein, 12 aa, synthetic construct
  REGION 1..12: note = Synthetic
FIRQYFTVFDRA

SEQ ID NO: 6416 - protein, 12 aa, synthetic construct
  REGION 1..12: note = Synthetic
FIRQYFTVFDRA

SEQ ID NO: 6417 - protein, 12 aa, synthetic construct
  REGION 1..12: note = Synthetic
FIRQYFTVFDRA

SEQ ID NO: 6418 - protein, 11 aa, synthetic construct
  REGION 1..11: note = Synthetic
RYGKVWSDYVG

SEQ ID NO: 6419 - protein, 12 aa, synthetic construct
  REGION 1..12: note = Synthetic
YIQEARNCLQKL

SEQ ID NO: 6420 - protein, 12 aa, synthetic construct
  REGION 1..12: note = Synthetic
YGQYLERLKQFV

SEQ ID NO: 6421 - protein, 11 aa, synthetic construct
  REGION 1..11: note = Synthetic
TYIRKALEDIR

SEQ ID NO: 6422 - protein, 11 aa, synthetic construct
  REGION 1..11: note = Synthetic
VTSARTALGRA

SEQ ID NO: 6423 - protein, 11 aa, synthetic construct
  REGION 1..11: note = Synthetic
ECNKIIQKALS

SEQ ID NO: 6424 - protein, 11 aa, synthetic construct
  REGION 1..11: note = Synthetic
SYLGRFYQDLK

SEQ ID NO: 6425 - protein, 12 aa, synthetic construct
  REGION 1..12: note = Synthetic
EFMQRALQDLRK

SEQ ID NO: 6426 - protein, 12 aa, synthetic construct
  REGION 1..12: note = Synthetic
LRTVPGALGAWL

SEQ ID NO: 6427 - protein, 12 aa, synthetic construct
  REGION 1..12: note = Synthetic
VSSLVKSIGNSY

SEQ ID NO: 6428 - protein, 12 aa, synthetic construct
  REGION 1..12: note = Synthetic
APRCGDKIYNPL

SEQ ID NO: 6429 - protein, 11 aa, synthetic construct
  REGION 1..11: note = Synthetic
EWLRRYLENGK

SEQ ID NO: 6430 - protein, 12 aa, synthetic construct
  REGION 1..12: note = Synthetic
WLQKWYGGASSI

SEQ ID NO: 6431 - protein, 11 aa, synthetic construct
  REGION 1..11: note = Synthetic
AGAIGRAGPRG

SEQ ID NO: 6432 - protein, 12 aa, synthetic construct
  REGION 1..12: note = Synthetic
KMYTGLCNFVER

SEQ ID NO: 6433 - protein, 11 aa, synthetic construct
  REGION 1..11: note = Synthetic
SFVSSLVRSIS

SEQ ID NO: 6434 - protein, 12 aa, synthetic construct
  REGION 1..12: note = Synthetic
CGSIIAKILAGY

SEQ ID NO: 6435 - protein, 12 aa, synthetic construct
  REGION 1..12: note = Synthetic
HQLRSLAGTYLN

SEQ ID NO: 6436 - protein, 11 aa, synthetic construct
  REGION 1..11: note = Synthetic
CNRAMSGINNY

SEQ ID NO: 6437 - protein, 12 aa, synthetic construct
  REGION 1..12: note = Synthetic
CRSLCEAVRAGC

SEQ ID NO: 6438 - protein, 11 aa, synthetic construct
  REGION 1..11: note = Synthetic
IAKVGQLFAAW

SEQ ID NO: 6439 - protein, 11 aa, synthetic construct
  REGION 1..11: note = Synthetic
ARVFAHGAATL

SEQ ID NO: 6440 - protein, 12 aa, synthetic construct
  REGION 1..12: note = Synthetic
VSRMVSTMLSGL

SEQ ID NO: 6441 - protein, 11 aa, synthetic construct
  REGION 1..11: note = Synthetic
RMYSEIIALMK

SEQ ID NO: 6442 - protein, 11 aa, synthetic construct
  REGION 1..11: note = Synthetic
QLGQALNGVYR

SEQ ID NO: 6443 - protein, 12 aa, synthetic construct
  REGION 1..12: note = Synthetic
RAVASGCQRCCD

SEQ ID NO: 6444 - protein, 12 aa, synthetic construct
  REGION 1..12: note = Synthetic
VVTIINTLLKLA

SEQ ID NO: 6445 - protein, 12 aa, synthetic construct
  REGION 1..12: note = Synthetic
KLFSDLGSSYAK

SEQ ID NO: 6446 - protein, 12 aa, synthetic construct
  REGION 1..12: note = Synthetic
IIATLKNGVQTC

SEQ ID NO: 6447 - protein, 12 aa, synthetic construct
  REGION 1..12: note = Synthetic
ISQASSCLQKLL

SEQ ID NO: 6448 - protein, 12 aa, synthetic construct
  REGION 1..12: note = Synthetic
HGAMGAFRALCG

SEQ ID NO: 6449 - protein, 11 aa, synthetic construct
  REGION 1..11: note = Synthetic
ASCGGRAGGRC

SEQ ID NO: 6450 - protein, 12 aa, synthetic construct
  REGION 1..12: note = Synthetic
YKQIIAVLAQAF

SEQ ID NO: 6451 - protein, 11 aa, synthetic construct
  REGION 1..11: note = Synthetic
FTALVTQCQKM

SEQ ID NO: 6452 - protein, 12 aa, synthetic construct
  REGION 1..12: note = Synthetic
RSWVEKIVQGVQ

SEQ ID NO: 6453 - protein, 12 aa, synthetic construct
  REGION 1..12: note = Synthetic
MAQYAADLRRYI

SEQ ID NO: 6454 - protein, 12 aa, synthetic construct
  REGION 1..12: note = Synthetic
LLQAAPRGAAHY

SEQ ID NO: 6455 - protein, 11 aa, synthetic construct
  REGION 1..11: note = Synthetic
TIFNTLLKLAG

SEQ ID NO: 6456 - protein, 12 aa, synthetic construct
  REGION 1..12: note = Synthetic
YQGMCRNACREY

SEQ ID NO: 6457 - protein, 11 aa, synthetic construct
  REGION 1..11: note = Synthetic
VARFYAAAMHV

SEQ ID NO: 6458 - protein, 12 aa, synthetic construct
  REGION 1..12: note = Synthetic
SLFSSVFSSCQR

SEQ ID NO: 6459 - protein, 12 aa, synthetic construct
  REGION 1..12: note = Synthetic
SLFSSVFSSCQR

SEQ ID NO: 6460 - protein, 12 aa, synthetic construct
  REGION 1..12: note = Synthetic
RGLMQSLPTFIQ

SEQ ID NO: 6461 - protein, 12 aa, synthetic construct
  REGION 1..12: note = Synthetic
ASTGWNSVSRII

SEQ ID NO: 6462 - protein, 12 aa, synthetic construct
  REGION 1..12: note = Synthetic
LRAGAQQGLSRA

SEQ ID NO: 6463 - protein, 12 aa, synthetic construct
  REGION 1..12: note = Synthetic
RKMAGEMAEGLR

SEQ ID NO: 6464 - protein, 12 aa, synthetic construct
  REGION 1..12: note = Synthetic
LRSGVQQLIQYY

SEQ ID NO: 6465 - protein, 11 aa, synthetic construct
  REGION 1..11: note = Synthetic
ASAILNRMQNI

SEQ ID NO: 6466 - protein, 12 aa, synthetic construct
  REGION 1..12: note = Synthetic
CGKSLPGVYTNV

SEQ ID NO: 6467 - protein, 12 aa, synthetic construct
  REGION 1..12: note = Synthetic
RICTPMGKLGDS

SEQ ID NO: 6468 - protein, 11 aa, synthetic construct
  REGION 1..11: note = Synthetic
GVYTKVCKYVD

SEQ ID NO: 6469 - protein, 12 aa, synthetic construct
  REGION 1..12: note = Synthetic
VTGIITQGARNF

SEQ ID NO: 6470 - protein, 11 aa, synthetic construct
  REGION 1..11: note = Synthetic
GVPGVYTNLCK

SEQ ID NO: 6471 - protein, 12 aa, synthetic construct
  REGION 1..12: note = Synthetic
CQSVAASCARSC

SEQ ID NO: 6472 - protein, 12 aa, synthetic construct
  REGION 1..12: note = Synthetic
ACNSAMSIINKY

SEQ ID NO: 6473 - protein, 12 aa, synthetic construct
  REGION 1..12: note = Synthetic
LSHYYASLCHYL

SEQ ID NO: 6474 - protein, 11 aa, synthetic construct
  REGION 1..11: note = Synthetic
GEAFGKKWCSL

SEQ ID NO: 6475 - protein, 11 aa, synthetic construct
  REGION 1..11: note = Synthetic
SLVRDGCGCCK

SEQ ID NO: 6476 - protein, 11 aa, synthetic construct
  REGION 1..11: note = Synthetic
GLVRDGCGCCK

SEQ ID NO: 6477 - protein, 11 aa, synthetic construct
  REGION 1..11: note = Synthetic
GYPGVYTNLCK

SEQ ID NO: 6478 - protein, 11 aa, synthetic construct
  REGION 1..11: note = Synthetic
GKNISTYLTQV

SEQ ID NO: 6479 - protein, 12 aa, synthetic construct
  REGION 1..12: note = Synthetic
ILKRGPGVGEGL

SEQ ID NO: 6480 - protein, 12 aa, synthetic construct
  REGION 1..12: note = Synthetic
SLISPLAQAVRS

SEQ ID NO: 6481 - protein, 11 aa, synthetic construct
  REGION 1..11: note = Synthetic
RVVSGAANVIG

SEQ ID NO: 6482 - protein, 11 aa, synthetic construct
  REGION 1..11: note = Synthetic
MREYMHHLLAL

SEQ ID NO: 6483 - protein, 12 aa, synthetic construct
  REGION 1..12: note = Synthetic
SGGNFLTGLGHR

SEQ ID NO: 6484 - protein, 12 aa, synthetic construct
  REGION 1..12: note = Synthetic
KQLYNKYPDAVA

SEQ ID NO: 6485 - protein, 11 aa, synthetic construct
  REGION 1..11: note = Synthetic
KGFQCCSSFCG

SEQ ID NO: 6486 - protein, 12 aa, synthetic construct
  REGION 1..12: note = Synthetic
NIASKLPDAAAK

SEQ ID NO: 6487 - protein, 11 aa, synthetic construct
  REGION 1..11: note = Synthetic
LTHCASAFPHL

SEQ ID NO: 6488 - protein, 11 aa, synthetic construct
  REGION 1..11: note = Synthetic
QAANEWGRSGK

SEQ ID NO: 6489 - protein, 12 aa, synthetic construct
  REGION 1..12: note = Synthetic
NCWATGWGLVSK

SEQ ID NO: 6490 - protein, 11 aa, synthetic construct
  REGION 1..11: note = Synthetic
GLLSGWARNGT

SEQ ID NO: 6491 - protein, 12 aa, synthetic construct
  REGION 1..12: note = Synthetic
LLAWCAGACRGA

SEQ ID NO: 6492 - protein, 12 aa, synthetic construct
  REGION 1..12: note = Synthetic
VYTHGCGCVRSA

SEQ ID NO: 6493 - protein, 11 aa, synthetic construct
  REGION 1..11: note = Synthetic
GQQMFQGVKSI

SEQ ID NO: 6494 - protein, 12 aa, synthetic construct
  REGION 1..12: note = Synthetic
RNCRELLSQGAT

SEQ ID NO: 6495 - protein, 11 aa, synthetic construct
  REGION 1..11: note = Synthetic
VGRAAGLLSGL

SEQ ID NO: 6496 - protein, 11 aa, synthetic construct
  REGION 1..11: note = Synthetic
GTILGRWCGSG

SEQ ID NO: 6497 - protein, 12 aa, synthetic construct
  REGION 1..12: note = Synthetic
AAALGKALCALL

SEQ ID NO: 6498 - protein, 11 aa, synthetic construct
  REGION 1..11: note = Synthetic
VALISKLGTAV

SEQ ID NO: 6499 - protein, 12 aa, synthetic construct
  REGION 1..12: note = Synthetic
AKAAMTELKSCI

SEQ ID NO: 6500 - protein, 12 aa, synthetic construct
  REGION 1..12: note = Synthetic
RYCAGACEAAAR

SEQ ID NO: 6501 - protein, 11 aa, synthetic construct
  REGION 1..11: note = Synthetic
QGCSIYKDYYR

SEQ ID NO: 6502 - protein, 12 aa, synthetic construct
  REGION 1..12: note = Synthetic
ASALGSWKAFLG

SEQ ID NO: 6503 - protein, 11 aa, synthetic construct
  REGION 1..11: note = Synthetic
AANAQKWANQC

SEQ ID NO: 6504 - protein, 12 aa, synthetic construct
  REGION 1..12: note = Synthetic
VAKQCSAGCAAM

SEQ ID NO: 6505 - protein, 11 aa, synthetic construct
  REGION 1..11: note = Synthetic
TYYSIIGGGLR

SEQ ID NO: 6506 - protein, 11 aa, synthetic construct
  REGION 1..11: note = Synthetic
ACRRCMGDAGA

SEQ ID NO: 6507 - protein, 11 aa, synthetic construct
  REGION 1..11: note = Synthetic
GSTGTQLCKAL

SEQ ID NO: 6508 - protein, 11 aa, synthetic construct
  REGION 1..11: note = Synthetic
QVAKAGGTWLG

SEQ ID NO: 6509 - protein, 11 aa, synthetic construct
  REGION 1..11: note = Synthetic
NGLAFISSGLK

SEQ ID NO: 6510 - protein, 11 aa, synthetic construct
  REGION 1..11: note = Synthetic
GEKAITQVSKG

SEQ ID NO: 6511 - protein, 12 aa, synthetic construct
  REGION 1..12: note = Synthetic
GALSTMVQLYSR

SEQ ID NO: 6512 - protein, 11 aa, synthetic construct
  REGION 1..11: note = Synthetic
GARGCNGIPGA

SEQ ID NO: 6513 - protein, 11 aa, synthetic construct
  REGION 1..11: note = Synthetic
VAKFYAAAMNA

SEQ ID NO: 6514 - protein, 11 aa, synthetic construct
  REGION 1..11: note = Synthetic
QAIRAAQGLLA

SEQ ID NO: 6515 - protein, 12 aa, synthetic construct
  REGION 1..12: note = Synthetic
GSFVAPVRGVYS

SEQ ID NO: 6516 - protein, 11 aa, synthetic construct
  REGION 1..11: note = Synthetic
KAYNSCISQGS

SEQ ID NO: 6517 - protein, 12 aa, synthetic construct
  REGION 1..12: note = Synthetic
REGAERGLSAIR

SEQ ID NO: 6518 - protein, 11 aa, synthetic construct
  REGION 1..11: note = Synthetic
QLLAGGLHAGK

SEQ ID NO: 6519 - protein, 11 aa, synthetic construct
  REGION 1..11: note = Synthetic
ALLRAAGSLAA

SEQ ID NO: 6520 - protein, 11 aa, synthetic construct
  REGION 1..11: note = Synthetic
KMASGAANVVG

SEQ ID NO: 6521 - protein, 11 aa, synthetic construct
  REGION 1..11: note = Synthetic
GVAQGIVSYGR

SEQ ID NO: 6522 - protein, 12 aa, synthetic construct
  REGION 1..12: note = Synthetic
ALARCPGCGQGV

SEQ ID NO: 6523 - protein, 12 aa, synthetic construct
  REGION 1..12: note = Synthetic
TAYRTALSHGHQ

SEQ ID NO: 6524 - protein, 11 aa, synthetic construct
  REGION 1..11: note = Synthetic
SGLAFISSGLK

SEQ ID NO: 6525 - protein, 11 aa, synthetic construct
  REGION 1..11: note = Synthetic
AYPGVGSALGR

SEQ ID NO: 6526 - protein, 12 aa, synthetic construct
  REGION 1..12: note = Synthetic
LPAGGGTVLTKM

SEQ ID NO: 6527 - protein, 11 aa, synthetic construct
  REGION 1..11: note = Synthetic
LERAASRANTV

SEQ ID NO: 6528 - protein, 11 aa, synthetic construct
  REGION 1..11: note = Synthetic
QAGDTIFNRAK

SEQ ID NO: 6529 - protein, 11 aa, synthetic construct
  REGION 1..11: note = Synthetic
VARFYAAAMSG

SEQ ID NO: 6530 - protein, 11 aa, synthetic construct
  REGION 1..11: note = Synthetic
SFAGNGLSALR

SEQ ID NO: 6531 - protein, 11 aa, synthetic construct
  REGION 1..11: note = Synthetic
MKHLDQIFQNL

SEQ ID NO: 6532 - protein, 12 aa, synthetic construct
  REGION 1..12: note = Synthetic
AARGTNVGRECC

SEQ ID NO: 6533 - protein, 12 aa, synthetic construct
  REGION 1..12: note = Synthetic
GIQGGSRCLACV

SEQ ID NO: 6534 - protein, 12 aa, synthetic construct
  REGION 1..12: note = Synthetic
LTAGVSAGRQMI

SEQ ID NO: 6535 - protein, 11 aa, synthetic construct
  REGION 1..11: note = Synthetic
AGRGETCYRTV

SEQ ID NO: 6536 - protein, 12 aa, synthetic construct
  REGION 1..12: note = Synthetic
MAAASAGATRLL

SEQ ID NO: 6537 - protein, 12 aa, synthetic construct
  REGION 1..12: note = Synthetic
CAAAAGRAGGSC

SEQ ID NO: 6538 - protein, 12 aa, synthetic construct
  REGION 1..12: note = Synthetic
GAGGGGCRGVDR

SEQ ID NO: 6539 - protein, 11 aa, synthetic construct
  REGION 1..11: note = Synthetic
AEGAFRRGPGL

SEQ ID NO: 6540 - protein, 11 aa, synthetic construct
  REGION 1..11: note = Synthetic
DYRGGGRTVIQ

SEQ ID NO: 6541 - protein, 12 aa, synthetic construct
  REGION 1..12: note = Synthetic
GSHVAQACVGHC

SEQ ID NO: 6542 - protein, 11 aa, synthetic construct
  REGION 1..11: note = Synthetic
AERGARNALGG

SEQ ID NO: 6543 - protein, 12 aa, synthetic construct
  REGION 1..12: note = Synthetic
VQKAAQAAVASY

SEQ ID NO: 6544 - protein, 11 aa, synthetic construct
  REGION 1..11: note = Synthetic
HAVSNACALGK

SEQ ID NO: 6545 - protein, 12 aa, synthetic construct
  REGION 1..12: note = Synthetic
IRDLYHYITSYV

SEQ ID NO: 6546 - protein, 12 aa, synthetic construct
  REGION 1..12: note = Synthetic
IRDLYHYITSYV

SEQ ID NO: 6547 - protein, 11 aa, synthetic construct
  REGION 1..11: note = Synthetic
ELHRALERLAA

SEQ ID NO: 6548 - protein, 11 aa, synthetic construct
  REGION 1..11: note = Synthetic
RFFSAAAAPAA

SEQ ID NO: 6549 - protein, 12 aa, synthetic construct
  REGION 1..12: note = Synthetic
GYLNRIHELLNG

SEQ ID NO: 6550 - protein, 11 aa, synthetic construct
  REGION 1..11: note = Synthetic
KGQGACQTYCT

SEQ ID NO: 6551 - protein, 11 aa, synthetic construct
  REGION 1..11: note = Synthetic
YSNFISHLANI

SEQ ID NO: 6552 - protein, 11 aa, synthetic construct
  REGION 1..11: note = Synthetic
YHTGLHTGHSF

SEQ ID NO: 6553 - protein, 12 aa, synthetic construct
  REGION 1..12: note = Synthetic
HEMLQQIFSLFR

SEQ ID NO: 6554 - protein, 11 aa, synthetic construct
  REGION 1..11: note = Synthetic
AHCIGGFWREV

SEQ ID NO: 6555 - protein, 11 aa, synthetic construct
  REGION 1..11: note = Synthetic
MRQYGECLHSC

SEQ ID NO: 6556 - protein, 11 aa, synthetic construct
  REGION 1..11: note = Synthetic
VTSGKEFYGRG

SEQ ID NO: 6557 - protein, 12 aa, synthetic construct
  REGION 1..12: note = Synthetic
RCGDKFYDPLQH

SEQ ID NO: 6558 - protein, 11 aa, synthetic construct
  REGION 1..11: note = Synthetic
TWAGKMYGPGG

SEQ ID NO: 6559 - protein, 12 aa, synthetic construct
  REGION 1..12: note = Synthetic
LAGCLSQLHSGL

SEQ ID NO: 6560 - protein, 11 aa, synthetic construct
  REGION 1..11: note = Synthetic
KLKDAFSHVVE

SEQ ID NO: 6561 - protein, 12 aa, synthetic construct
  REGION 1..12: note = Synthetic
LRHYCEPYTTWC

SEQ ID NO: 6562 - protein, 11 aa, synthetic construct
  REGION 1..11: note = Synthetic
HAVATACSLGK

SEQ ID NO: 6563 - protein, 12 aa, synthetic construct
  REGION 1..12: note = Synthetic
IIHVVATLLSTL

SEQ ID NO: 6564 - protein, 12 aa, synthetic construct
  REGION 1..12: note = Synthetic
LKECGHAYSGIV

SEQ ID NO: 6565 - protein, 11 aa, synthetic construct
  REGION 1..11: note = Synthetic
NAYSGILGIWH

SEQ ID NO: 6566 - protein, 12 aa, synthetic construct
  REGION 1..12: note = Synthetic
HLATSALSLLTH

SEQ ID NO: 6567 - protein, 11 aa, synthetic construct
  REGION 1..11: note = Synthetic
KVYEGAHRAVE

SEQ ID NO: 6568 - protein, 11 aa, synthetic construct
  REGION 1..11: note = Synthetic
ANGYVEHLFRY

SEQ ID NO: 6569 - protein, 11 aa, synthetic construct
  REGION 1..11: note = Synthetic
HMLTHLAEALH

SEQ ID NO: 6570 - protein, 11 aa, synthetic construct
  REGION 1..11: note = Synthetic
LHHLIAEIHTA

SEQ ID NO: 6571 - protein, 12 aa, synthetic construct
  REGION 1..12: note = Synthetic
LTSGVHTFPAVL

SEQ ID NO: 6572 - protein, 11 aa, synthetic construct
  REGION 1..11: note = Synthetic
GYCRTCCHWGE

SEQ ID NO: 6573 - protein, 11 aa, synthetic construct
  REGION 1..11: note = Synthetic
GHKVCTSCCEG

SEQ ID NO: 6574 - protein, 11 aa, synthetic construct
  REGION 1..11: note = Synthetic
GVYTKVCHYLE

SEQ ID NO: 6575 - protein, 11 aa, synthetic construct
  REGION 1..11: note = Synthetic
GQWYHTCGGSL

SEQ ID NO: 6576 - protein, 11 aa, synthetic construct
  REGION 1..11: note = Synthetic
GQAACGRAASG

SEQ ID NO: 6577 - protein, 11 aa, synthetic construct
  REGION 1..11: note = Synthetic
GALARAGAAGA

SEQ ID NO: 6578 - protein, 12 aa, synthetic construct
  REGION 1..12: note = Synthetic
HGLLASATNWIS

SEQ ID NO: 6579 - protein, 11 aa, synthetic construct
  REGION 1..11: note = Synthetic
AGLRLVGEAFH

SEQ ID NO: 6580 - protein, 12 aa, synthetic construct
  REGION 1..12: note = Synthetic
AFMASLATHFSN

SEQ ID NO: 6581 - protein, 11 aa, synthetic construct
  REGION 1..11: note = Synthetic
AAASSVAKGGA

SEQ ID NO: 6582 - protein, 12 aa, synthetic construct
  REGION 1..12: note = Synthetic
EGAKTGIKECQH

SEQ ID NO: 6583 - protein, 12 aa, synthetic construct
  REGION 1..12: note = Synthetic
ICAVGHGVAALC

SEQ ID NO: 6584 - protein, 11 aa, synthetic construct
  REGION 1..11: note = Synthetic
VTHVFGSGTQL

SEQ ID NO: 6585 - protein, 12 aa, synthetic construct
  REGION 1..12: note = Synthetic
AAGVAHAITAAC

SEQ ID NO: 6586 - protein, 12 aa, synthetic construct
  REGION 1..12: note = Synthetic
VFQTGKTGATTG

SEQ ID NO: 6587 - protein, 12 aa, synthetic construct
  REGION 1..12: note = Synthetic
GGGGPGTGWGTR

SEQ ID NO: 6588 - protein, 11 aa, synthetic construct
  REGION 1..11: note = Synthetic
ASALWAAAWHG

SEQ ID NO: 6589 - protein, 11 aa, synthetic construct
  REGION 1..11: note = Synthetic
AMGDRGMQLMH

SEQ ID NO: 6590 - protein, 11 aa, synthetic construct
  REGION 1..11: note = Synthetic
GVAHAVTAACS

SEQ ID NO: 6591 - protein, 11 aa, synthetic construct
  REGION 1..11: note = Synthetic
GVAHAVTAACS

SEQ ID NO: 6592 - protein, 11 aa, synthetic construct
  REGION 1..11: note = Synthetic
VHAIASAGVAF

SEQ ID NO: 6593 - protein, 11 aa, synthetic construct
  REGION 1..11: note = Synthetic
VHAIASAGVAF

SEQ ID NO: 6594 - protein, 12 aa, synthetic construct
  REGION 1..12: note = Synthetic
LWAALGAAAHIG

SEQ ID NO: 6595 - protein, 11 aa, synthetic construct
  REGION 1..11: note = Synthetic
AGRGGAAAPTA

SEQ ID NO: 6596 - protein, 12 aa, synthetic construct
  REGION 1..12: note = Synthetic
THAGGTGPEGCR

SEQ ID NO: 6597 - protein, 12 aa, synthetic construct
  REGION 1..12: note = Synthetic
GTAAAPAQGGAH

SEQ ID NO: 6598 - protein, 12 aa, synthetic construct
  REGION 1..12: note = Synthetic
GTAAAPAQGGAH

SEQ ID NO: 6599 - protein, 12 aa, synthetic construct
  REGION 1..12: note = Synthetic
GTAAAPAQGGAH

SEQ ID NO: 6600 - protein, 11 aa, synthetic construct
  REGION 1..11: note = Synthetic
LTNAIKDALAA

SEQ ID NO: 6601 - protein, 12 aa, synthetic construct
  REGION 1..12: note = Synthetic
FFESVYGQCKAI

SEQ ID NO: 6602 - protein, 11 aa, synthetic construct
  REGION 1..11: note = Synthetic
LTGLLGTLVTM

SEQ ID NO: 6603 - protein, 12 aa, synthetic construct
  REGION 1..12: note = Synthetic
MKNLLNRIIDDM

SEQ ID NO: 6604 - protein, 11 aa, synthetic construct
  REGION 1..11: note = Synthetic
LAQVGAKGDTA

SEQ ID NO: 6605 - protein, 12 aa, synthetic construct
  REGION 1..12: note = Synthetic
LLGGWMALGQGG

SEQ ID NO: 6606 - protein, 12 aa, synthetic construct
  REGION 1..12: note = Synthetic
SRLLSVGGEAFS

SEQ ID NO: 6607 - protein, 11 aa, synthetic construct
  REGION 1..11: note = Synthetic
AGAIIGTLLAL

SEQ ID NO: 6608 - protein, 12 aa, synthetic construct
  REGION 1..12: note = Synthetic
VFAVFSAAASNW

SEQ ID NO: 6609 - protein, 12 aa, synthetic construct
  REGION 1..12: note = Synthetic
VFAVFSAAASNW

SEQ ID NO: 6610 - protein, 12 aa, synthetic construct
  REGION 1..12: note = Synthetic
FGGTVYRSGESF

SEQ ID NO: 6611 - protein, 12 aa, synthetic construct
  REGION 1..12: note = Synthetic
NQWYTVCQTGWS

SEQ ID NO: 6612 - protein, 12 aa, synthetic construct
  REGION 1..12: note = Synthetic
TLASSYASWIQS

SEQ ID NO: 6613 - protein, 11 aa, synthetic construct
  REGION 1..11: note = Synthetic
ARFAAGVAEQF

SEQ ID NO: 6614 - protein, 12 aa, synthetic construct
  REGION 1..12: note = Synthetic
CQKICEPLGGYY

SEQ ID NO: 6615 - protein, 11 aa, synthetic construct
  REGION 1..11: note = Synthetic
FGAILGAILGV

SEQ ID NO: 6616 - protein, 12 aa, synthetic construct
  REGION 1..12: note = Synthetic
LISRISSVGGEA

SEQ ID NO: 6617 - protein, 11 aa, synthetic construct
  REGION 1..11: note = Synthetic
GTTGSGAGSGG

SEQ ID NO: 6618 - protein, 12 aa, synthetic construct
  REGION 1..12: note = Synthetic
RYIDFCESGLSR

SEQ ID NO: 6619 - protein, 12 aa, synthetic construct
  REGION 1..12: note = Synthetic
AFAGYSGLLAGV

SEQ ID NO: 6620 - protein, 12 aa, synthetic construct
  REGION 1..12: note = Synthetic
LVTTALTMGREI

SEQ ID NO: 6621 - protein, 11 aa, synthetic construct
  REGION 1..11: note = Synthetic
AHFYGHCGEQL

SEQ ID NO: 6622 - protein, 11 aa, synthetic construct
  REGION 1..11: note = Synthetic
IQSFEQVGTKV

SEQ ID NO: 6623 - protein, 11 aa, synthetic construct
  REGION 1..11: note = Synthetic
ELNQAVRTGGG

SEQ ID NO: 6624 - protein, 12 aa, synthetic construct
  REGION 1..12: note = Synthetic
AGVISWGEGCAR

SEQ ID NO: 6625 - protein, 12 aa, synthetic construct
  REGION 1..12: note = Synthetic
IRGFIDKIAENV

SEQ ID NO: 6626 - protein, 12 aa, synthetic construct
  REGION 1..12: note = Synthetic
KAGQLISELFTN

SEQ ID NO: 6627 - protein, 11 aa, synthetic construct
  REGION 1..11: note = Synthetic
SCYSAGIAKLE

SEQ ID NO: 6628 - protein, 11 aa, synthetic construct
  REGION 1..11: note = Synthetic
AGSWGAQIIGG

SEQ ID NO: 6629 - protein, 12 aa, synthetic construct
  REGION 1..12: note = Synthetic
TFLEDLKSFVKS

SEQ ID NO: 6630 - protein, 12 aa, synthetic construct
  REGION 1..12: note = Synthetic
SLCQPGQKLVSD

SEQ ID NO: 6631 - protein, 11 aa, synthetic construct
  REGION 1..11: note = Synthetic
AAELRNFLRDL

SEQ ID NO: 6632 - protein, 11 aa, synthetic construct
  REGION 1..11: note = Synthetic
NVSQGCQGGCA

SEQ ID NO: 6633 - protein, 12 aa, synthetic construct
  REGION 1..12: note = Synthetic
LLAAYAGPAQSL

SEQ ID NO: 6634 - protein, 12 aa, synthetic construct
  REGION 1..12: note = Synthetic
LISRISSVGGEA

SEQ ID NO: 6635 - protein, 11 aa, synthetic construct
  REGION 1..11: note = Synthetic
AASLGSQGSGL

SEQ ID NO: 6636 - protein, 12 aa, synthetic construct
  REGION 1..12: note = Synthetic
ALTQVEAAITRG

SEQ ID NO: 6637 - protein, 11 aa, synthetic construct
  REGION 1..11: note = Synthetic
GSQACAKGCEL

SEQ ID NO: 6638 - protein, 11 aa, synthetic construct
  REGION 1..11: note = Synthetic
AGASGVSSCMG

SEQ ID NO: 6639 - protein, 11 aa, synthetic construct
  REGION 1..11: note = Synthetic
AGASGVSSCMG

SEQ ID NO: 6640 - protein, 12 aa, synthetic construct
  REGION 1..12: note = Synthetic
LCEGVFRGVTSF

SEQ ID NO: 6641 - protein, 12 aa, synthetic construct
  REGION 1..12: note = Synthetic
EKLIQNIKEMVT

SEQ ID NO: 6642 - protein, 12 aa, synthetic construct
  REGION 1..12: note = Synthetic
HKGWDFVEGYFH

SEQ ID NO: 6643 - protein, 12 aa, synthetic construct
  REGION 1..12: note = Synthetic
ELYRVVESLAKA

SEQ ID NO: 6644 - protein, 11 aa, synthetic construct
  REGION 1..11: note = Synthetic
GAGGSGAISTA

SEQ ID NO: 6645 - protein, 12 aa, synthetic construct
  REGION 1..12: note = Synthetic
GWGDFYSNIKTV

SEQ ID NO: 6646 - protein, 12 aa, synthetic construct
  REGION 1..12: note = Synthetic
KSVCEVGSNWFQ

SEQ ID NO: 6647 - protein, 12 aa, synthetic construct
  REGION 1..12: note = Synthetic
WLSWGAALGAVA

SEQ ID NO: 6648 - protein, 12 aa, synthetic construct
  REGION 1..12: note = Synthetic
CARRLGEPCDQL

SEQ ID NO: 6649 - protein, 12 aa, synthetic construct
  REGION 1..12: note = Synthetic
GVVSGGAEPCSR

SEQ ID NO: 6650 - protein, 11 aa, synthetic construct
  REGION 1..11: note = Synthetic
CGGVLQGLVSW

SEQ ID NO: 6651 - protein, 12 aa, synthetic construct
  REGION 1..12: note = Synthetic
LISGWGNTLSSG

SEQ ID NO: 6652 - protein, 12 aa, synthetic construct
  REGION 1..12: note = Synthetic
SLISGWGNTLSS

SEQ ID NO: 6653 - protein, 12 aa, synthetic construct
  REGION 1..12: note = Synthetic
KALLDNCFRVME

SEQ ID NO: 6654 - protein, 11 aa, synthetic construct
  REGION 1..11: note = Synthetic
CNGMLQGILSF

SEQ ID NO: 6655 - protein, 12 aa, synthetic construct
  REGION 1..12: note = Synthetic
WIRDMYAKVTEI

SEQ ID NO: 6656 - protein, 12 aa, synthetic construct
  REGION 1..12: note = Synthetic
CQNGGTCVAQAM

SEQ ID NO: 6657 - protein, 12 aa, synthetic construct
  REGION 1..12: note = Synthetic
VFASLCAWYSGY

SEQ ID NO: 6658 - protein, 11 aa, synthetic construct
  REGION 1..11: note = Synthetic
YSRAFGEGASA

SEQ ID NO: 6659 - protein, 12 aa, synthetic construct
  REGION 1..12: note = Synthetic
AAAFGPGQTLLS

SEQ ID NO: 6660 - protein, 12 aa, synthetic construct
  REGION 1..12: note = Synthetic
LLASCVAAGQAV

SEQ ID NO: 6661 - protein, 12 aa, synthetic construct
  REGION 1..12: note = Synthetic
LLASCVAAGQAV

SEQ ID NO: 6662 - protein, 12 aa, synthetic construct
  REGION 1..12: note = Synthetic
LLASCVAAGQAV

SEQ ID NO: 6663 - protein, 12 aa, synthetic construct
  REGION 1..12: note = Synthetic
LLATLLRPADAC

SEQ ID NO: 6664 - protein, 12 aa, synthetic construct
  REGION 1..12: note = Synthetic
GAALVSSACGGC

SEQ ID NO: 6665 - protein, 12 aa, synthetic construct
  REGION 1..12: note = Synthetic
GIQTLMRRLEDG

SEQ ID NO: 6666 - protein, 11 aa, synthetic construct
  REGION 1..11: note = Synthetic
MDKVETFLRTV

SEQ ID NO: 6667 - protein, 12 aa, synthetic construct
  REGION 1..12: note = Synthetic
CLAYFTSGFNAA

SEQ ID NO: 6668 - protein, 11 aa, synthetic construct
  REGION 1..11: note = Synthetic
AERLGNTCERA

SEQ ID NO: 6669 - protein, 12 aa, synthetic construct
  REGION 1..12: note = Synthetic
RDLLDTASALYR

SEQ ID NO: 6670 - protein, 12 aa, synthetic construct
  REGION 1..12: note = Synthetic
AGGAGVNPATQG

SEQ ID NO: 6671 - protein, 12 aa, synthetic construct
  REGION 1..12: note = Synthetic
AVGERAGQLWSQ

SEQ ID NO: 6672 - protein, 11 aa, synthetic construct
  REGION 1..11: note = Synthetic
KVPELYKDILS

SEQ ID NO: 6673 - protein, 11 aa, synthetic construct
  REGION 1..11: note = Synthetic
DCISRGGTLGT

SEQ ID NO: 6674 - protein, 11 aa, synthetic construct
  REGION 1..11: note = Synthetic
GRNGYTAVIEV

SEQ ID NO: 6675 - protein, 11 aa, synthetic construct
  REGION 1..11: note = Synthetic
GESGTSGWRGG

SEQ ID NO: 6676 - protein, 12 aa, synthetic construct
  REGION 1..12: note = Synthetic
LASEGLKHFHEA

SEQ ID NO: 6677 - protein, 12 aa, synthetic construct
  REGION 1..12: note = Synthetic
AHVMSVLHEMLQ

SEQ ID NO: 6678 - protein, 12 aa, synthetic construct
  REGION 1..12: note = Synthetic
SILDQILQNIGR

SEQ ID NO: 6679 - protein, 11 aa, synthetic construct
  REGION 1..11: note = Synthetic
DFCNDVLARAK

SEQ ID NO: 6680 - protein, 11 aa, synthetic construct
  REGION 1..11: note = Synthetic
KLYTELYQQLN

SEQ ID NO: 6681 - protein, 11 aa, synthetic construct
  REGION 1..11: note = Synthetic
KFYTELYQQLN

SEQ ID NO: 6682 - protein, 11 aa, synthetic construct
  REGION 1..11: note = Synthetic
KFCTELYQQLN

SEQ ID NO: 6683 - protein, 11 aa, synthetic construct
  REGION 1..11: note = Synthetic
KFYTELYQQLN

SEQ ID NO: 6684 - protein, 12 aa, synthetic construct
  REGION 1..12: note = Synthetic
RKGLSELDTLFS

SEQ ID NO: 6685 - protein, 12 aa, synthetic construct
  REGION 1..12: note = Synthetic
RKGLSELDTLFS

SEQ ID NO: 6686 - protein, 11 aa, synthetic construct
  REGION 1..11: note = Synthetic
WNGVGASLWAA

SEQ ID NO: 6687 - protein, 12 aa, synthetic construct
  REGION 1..12: note = Synthetic
REALEEFKKLVQ

SEQ ID NO: 6688 - protein, 12 aa, synthetic construct
  REGION 1..12: note = Synthetic
NIVEAMERFGSR

SEQ ID NO: 6689 - protein, 12 aa, synthetic construct
  REGION 1..12: note = Synthetic
LASQGLGPGSTV

SEQ ID NO: 6690 - protein, 12 aa, synthetic construct
  REGION 1..12: note = Synthetic
TLFSSIFTEAQK

SEQ ID NO: 6691 - protein, 12 aa, synthetic construct
  REGION 1..12: note = Synthetic
GCGVGTGAADKA

SEQ ID NO: 6692 - protein, 11 aa, synthetic construct
  REGION 1..11: note = Synthetic
LEAIVKAGITI

SEQ ID NO: 6693 - protein, 12 aa, synthetic construct
  REGION 1..12: note = Synthetic
RAISQGVAEWTA

SEQ ID NO: 6694 - protein, 12 aa, synthetic construct
  REGION 1..12: note = Synthetic
TVGGGVFALVTA

SEQ ID NO: 6695 - protein, 12 aa, synthetic construct
  REGION 1..12: note = Synthetic
SAGSTVYAPFTG

SEQ ID NO: 6696 - protein, 12 aa, synthetic construct
  REGION 1..12: note = Synthetic
ALTCLGGFASPG

SEQ ID NO: 6697 - protein, 11 aa, synthetic construct
  REGION 1..11: note = Synthetic
GKEGMGAWPTW

SEQ ID NO: 6698 - protein, 12 aa, synthetic construct
  REGION 1..12: note = Synthetic
QVMAAYQQIVGG

SEQ ID NO: 6699 - protein, 11 aa, synthetic construct
  REGION 1..11: note = Synthetic
LAALVQNYVQM

SEQ ID NO: 6700 - protein, 11 aa, synthetic construct
  REGION 1..11: note = Synthetic
LDDILQRLVKL

SEQ ID NO: 6701 - protein, 12 aa, synthetic construct
  REGION 1..12: note = Synthetic
SGAIGPVEAAIR

SEQ ID NO: 6702 - protein, 11 aa, synthetic construct
  REGION 1..11: note = Synthetic
LAALVQNYVQM

SEQ ID NO: 6703 - protein, 12 aa, synthetic construct
  REGION 1..12: note = Synthetic
GRMKELLETVVN

SEQ ID NO: 6704 - protein, 11 aa, synthetic construct
  REGION 1..11: note = Synthetic
TFMGCLKNCAD

SEQ ID NO: 6705 - protein, 12 aa, synthetic construct
  REGION 1..12: note = Synthetic
NNIMRTIIEFLS

SEQ ID NO: 6706 - protein, 12 aa, synthetic construct
  REGION 1..12: note = Synthetic
LFALLAAGVAPL

SEQ ID NO: 6707 - protein, 12 aa, synthetic construct
  REGION 1..12: note = Synthetic
EWVQRYMKNLDA

SEQ ID NO: 6708 - protein, 12 aa, synthetic construct
  REGION 1..12: note = Synthetic
LLGAWAALAGGV

SEQ ID NO: 6709 - protein, 12 aa, synthetic construct
  REGION 1..12: note = Synthetic
RAISQGVAEWTA

SEQ ID NO: 6710 - protein, 11 aa, synthetic construct
  REGION 1..11: note = Synthetic
QCCTSICSLYQ

SEQ ID NO: 6711 - protein, 11 aa, synthetic construct
  REGION 1..11: note = Synthetic
QCCTSICSLYQ

SEQ ID NO: 6712 - protein, 11 aa, synthetic construct
  REGION 1..11: note = Synthetic
TGCTCGSACGS

SEQ ID NO: 6713 - protein, 11 aa, synthetic construct
  REGION 1..11: note = Synthetic
AAGASVATELR

SEQ ID NO: 6714 - protein, 12 aa, synthetic construct
  REGION 1..12: note = Synthetic
KKGTNYLADVFE

SEQ ID NO: 6715 - protein, 12 aa, synthetic construct
  REGION 1..12: note = Synthetic
LSSYWESAKTAA

SEQ ID NO: 6716 - protein, 12 aa, synthetic construct
  REGION 1..12: note = Synthetic
LVTPVRTLATEA

SEQ ID NO: 6717 - protein, 12 aa, synthetic construct
  REGION 1..12: note = Synthetic
MAAALALVAGVL

SEQ ID NO: 6718 - protein, 11 aa, synthetic construct
  REGION 1..11: note = Synthetic
QCCTSICSLYQ

SEQ ID NO: 6719 - protein, 11 aa, synthetic construct
  REGION 1..11: note = Synthetic
LKWIQEYLEKA

SEQ ID NO: 6720 - protein, 11 aa, synthetic construct
  REGION 1..11: note = Synthetic
KWVREYINSLE

SEQ ID NO: 6721 - protein, 12 aa, synthetic construct
  REGION 1..12: note = Synthetic
VSSALDKLKEFG

SEQ ID NO: 6722 - protein, 11 aa, synthetic construct
  REGION 1..11: note = Synthetic
SGNTGADSLGR

SEQ ID NO: 6723 - protein, 11 aa, synthetic construct
  REGION 1..11: note = Synthetic
GGGGGAAGGAE

SEQ ID NO: 6724 - protein, 12 aa, synthetic construct
  REGION 1..12: note = Synthetic
QIAAHVISEASS

SEQ ID NO: 6725 - protein, 11 aa, synthetic construct
  REGION 1..11: note = Synthetic
AAPAAEGVGAA

SEQ ID NO: 6726 - protein, 11 aa, synthetic construct
  REGION 1..11: note = Synthetic
FHFAADCCTSY

SEQ ID NO: 6727 - protein, 11 aa, synthetic construct
  REGION 1..11: note = Synthetic
DFGAGVAGHLG

SEQ ID NO: 6728 - protein, 11 aa, synthetic construct
  REGION 1..11: note = Synthetic
VDQGATGASQG

SEQ ID NO: 6729 - protein, 12 aa, synthetic construct
  REGION 1..12: note = Synthetic
RNGHEYYGDYYQ

SEQ ID NO: 6730 - protein, 12 aa, synthetic construct
  REGION 1..12: note = Synthetic
AQAISVLHEMMQ

SEQ ID NO: 6731 - protein, 12 aa, synthetic construct
  REGION 1..12: note = Synthetic
AAALHNLDEAVK

SEQ ID NO: 6732 - protein, 12 aa, synthetic construct
  REGION 1..12: note = Synthetic
DGWSHFPTCYNS

SEQ ID NO: 6733 - protein, 12 aa, synthetic construct
  REGION 1..12: note = Synthetic
AQAISVLHEMIQ

SEQ ID NO: 6734 - protein, 12 aa, synthetic construct
  REGION 1..12: note = Synthetic
AQAISVLHEMIQ

SEQ ID NO: 6735 - protein, 12 aa, synthetic construct
  REGION 1..12: note = Synthetic
AQAISVLHEMIQ

SEQ ID NO: 6736 - protein, 12 aa, synthetic construct
  REGION 1..12: note = Synthetic
AQAISVLHEMIQ

SEQ ID NO: 6737 - protein, 11 aa, synthetic construct
  REGION 1..11: note = Synthetic
AAAVVSHFNDC

SEQ ID NO: 6738 - protein, 12 aa, synthetic construct
  REGION 1..12: note = Synthetic
TQAISVLHEMIQ

SEQ ID NO: 6739 - protein, 12 aa, synthetic construct
  REGION 1..12: note = Synthetic
TQAISVLHEMIQ

SEQ ID NO: 6740 - protein, 12 aa, synthetic construct
  REGION 1..12: note = Synthetic
QTVKTICDEVLH

SEQ ID NO: 6741 - protein, 12 aa, synthetic construct
  REGION 1..12: note = Synthetic
AQAISAFHEMIQ

SEQ ID NO: 6742 - protein, 12 aa, synthetic construct
  REGION 1..12: note = Synthetic
SVLTSLLEAFAH

SEQ ID NO: 6743 - protein, 12 aa, synthetic construct
  REGION 1..12: note = Synthetic
THFGEPLEKVAS

SEQ ID NO: 6744 - protein, 12 aa, synthetic construct
  REGION 1..12: note = Synthetic
LEGLGQQVGSHF

SEQ ID NO: 6745 - protein, 12 aa, synthetic construct
  REGION 1..12: note = Synthetic
RSYCHPIETLVD

SEQ ID NO: 6746 - protein, 12 aa, synthetic construct
  REGION 1..12: note = Synthetic
RTCLHYLGEFGE

SEQ ID NO: 6747 - protein, 11 aa, synthetic construct
  REGION 1..11: note = Synthetic
GGQASGWCSEG

SEQ ID NO: 6748 - protein, 12 aa, synthetic construct
  REGION 1..12: note = Synthetic
RAGLQEGDQVLA

SEQ ID NO: 6749 - protein, 12 aa, synthetic construct
  REGION 1..12: note = Synthetic
ELAADGVGAASR

SEQ ID NO: 6750 - protein, 11 aa, synthetic construct
  REGION 1..11: note = Synthetic
QCLDVVTHWIQ

SEQ ID NO: 6751 - protein, 12 aa, synthetic construct
  REGION 1..12: note = Synthetic
IEDMARTFFAHF

SEQ ID NO: 6752 - protein, 11 aa, synthetic construct
  REGION 1..11: note = Synthetic
ALAAAAQDAIG

SEQ ID NO: 6753 - protein, 12 aa, synthetic construct
  REGION 1..12: note = Synthetic
SAGQTLGSEYDR

SEQ ID NO: 6754 - protein, 11 aa, synthetic construct
  REGION 1..11: note = Synthetic
GHDLSEWLKGC

SEQ ID NO: 6755 - protein, 11 aa, synthetic construct
  REGION 1..11: note = Synthetic
IETIINTFHQY

SEQ ID NO: 6756 - protein, 12 aa, synthetic construct
  REGION 1..12: note = Synthetic
QTMATKAPECVE

SEQ ID NO: 6757 - protein, 12 aa, synthetic construct
  REGION 1..12: note = Synthetic
KTAFQEALDAAG

SEQ ID NO: 6758 - protein, 12 aa, synthetic construct
  REGION 1..12: note = Synthetic
RQAATMLEEAAS

SEQ ID NO: 6759 - protein, 11 aa, synthetic construct
  REGION 1..11: note = Synthetic
GAPGKDGYDGL

SEQ ID NO: 6760 - protein, 12 aa, synthetic construct
  REGION 1..12: note = Synthetic
AGVVSWGEGCAQ

SEQ ID NO: 6761 - protein, 12 aa, synthetic construct
  REGION 1..12: note = Synthetic
AGVVSWGEGCAQ

SEQ ID NO: 6762 - protein, 11 aa, synthetic construct
  REGION 1..11: note = Synthetic
LQSGDTLGASW

SEQ ID NO: 6763 - protein, 12 aa, synthetic construct
  REGION 1..12: note = Synthetic
GLGAGERWADLA

SEQ ID NO: 6764 - protein, 12 aa, synthetic construct
  REGION 1..12: note = Synthetic
ALSAMENLITYA

SEQ ID NO: 6765 - protein, 12 aa, synthetic construct
  REGION 1..12: note = Synthetic
AGAEVFSGLSSL

SEQ ID NO: 6766 - protein, 11 aa, synthetic construct
  REGION 1..11: note = Synthetic
GQDGAQAGVDG

SEQ ID NO: 6767 - protein, 12 aa, synthetic construct
  REGION 1..12: note = Synthetic
GTIQGGLQDGLQ

SEQ ID NO: 6768 - protein, 12 aa, synthetic construct
  REGION 1..12: note = Synthetic
GVGDYIGIYASI

SEQ ID NO: 6769 - protein, 12 aa, synthetic construct
  REGION 1..12: note = Synthetic
TAIWNGGQDIVA

SEQ ID NO: 6770 - protein, 11 aa, synthetic construct
  REGION 1..11: note = Synthetic
TMKEVLEQAGA

SEQ ID NO: 6771 - protein, 12 aa, synthetic construct
  REGION 1..12: note = Synthetic
VDTVFNTVWTLG

SEQ ID NO: 6772 - protein, 12 aa, synthetic construct
  REGION 1..12: note = Synthetic
SELKDFGTEAAR

SEQ ID NO: 6773 - protein, 11 aa, synthetic construct
  REGION 1..11: note = Synthetic
DGFKAVVGDAQ

SEQ ID NO: 6774 - protein, 12 aa, synthetic construct
  REGION 1..12: note = Synthetic
SQATDFGEALVR

SEQ ID NO: 6775 - protein, 11 aa, synthetic construct
  REGION 1..11: note = Synthetic
GSSGGDNGEEG

SEQ ID NO: 6776 - protein, 11 aa, synthetic construct
  REGION 1..11: note = Synthetic
VTDISGGCGAM

SEQ ID NO: 6777 - protein, 11 aa, synthetic construct
  REGION 1..11: note = Synthetic
QLPSGCQAGLD

SEQ ID NO: 6778 - protein, 12 aa, synthetic construct
  REGION 1..12: note = Synthetic
TCVEVASELGKS

SEQ ID NO: 6779 - protein, 12 aa, synthetic construct
  REGION 1..12: note = Synthetic
GMEGANSIFSGF

SEQ ID NO: 6780 - protein, 11 aa, synthetic construct
  REGION 1..11: note = Synthetic
LAALVQDYVQM

SEQ ID NO: 6781 - protein, 11 aa, synthetic construct
  REGION 1..11: note = Synthetic
MAEVGGVFASL

SEQ ID NO: 6782 - protein, 11 aa, synthetic construct
  REGION 1..11: note = Synthetic
EGVKEGIEKAG

SEQ ID NO: 6783 - protein, 11 aa, synthetic construct
  REGION 1..11: note = Synthetic
ASTIAEYISGY

SEQ ID NO: 6784 - protein, 12 aa, synthetic construct
  REGION 1..12: note = Synthetic
SQLLKDIDGYGG

SEQ ID NO: 6785 - protein, 11 aa, synthetic construct
  REGION 1..11: note = Synthetic
AEPAADGVGAA

SEQ ID NO: 6786 - protein, 11 aa, synthetic construct
  REGION 1..11: note = Synthetic
AEPAADGVGAA

SEQ ID NO: 6787 - protein, 11 aa, synthetic construct
  REGION 1..11: note = Synthetic
AEPAADGVGAA

SEQ ID NO: 6788 - protein, 11 aa, synthetic construct
  REGION 1..11: note = Synthetic
AEPAADGVGAA

SEQ ID NO: 6789 - protein, 11 aa, synthetic construct
  REGION 1..11: note = Synthetic
AEPAADGVGAA

SEQ ID NO: 6790 - protein, 11 aa, synthetic construct
  REGION 1..11: note = Synthetic
AEPAADGVGAA

SEQ ID NO: 6791 - protein, 11 aa, synthetic construct
  REGION 1..11: note = Synthetic
AEPAADGVGAA

SEQ ID NO: 6792 - protein, 11 aa, synthetic construct
  REGION 1..11: note = Synthetic
GDYYGDLAARL

SEQ ID NO: 6793 - protein, 11 aa, synthetic construct
  REGION 1..11: note = Synthetic
LSSAFDGVSGL

SEQ ID NO: 6794 - protein, 11 aa, synthetic construct
  REGION 1..11: note = Synthetic
GVFGGIGDPVT

SEQ ID NO: 6795 - protein, 11 aa, synthetic construct
  REGION 1..11: note = Synthetic
CQALGSEITGF

SEQ ID NO: 6796 - protein, 12 aa, synthetic construct
  REGION 1..12: note = Synthetic
GIQTLMGRLEDG

SEQ ID NO: 6797 - protein, 12 aa, synthetic construct
  REGION 1..12: note = Synthetic
GIQTLMGRLEDG

SEQ ID NO: 6798 - protein, 12 aa, synthetic construct
  REGION 1..12: note = Synthetic
GIQTLMGRLEDG

SEQ ID NO: 6799 - protein, 12 aa, synthetic construct
  REGION 1..12: note = Synthetic
GIQTLMGRLEDG

SEQ ID NO: 6800 - protein, 12 aa, synthetic construct
  REGION 1..12: note = Synthetic
GIQTLMGRLEDG

SEQ ID NO: 6801 - protein, 12 aa, synthetic construct
  REGION 1..12: note = Synthetic
GIQTLMGRLEDG

SEQ ID NO: 6802 - protein, 11 aa, synthetic construct
  REGION 1..11: note = Synthetic
SVCTVAGDGGE

SEQ ID NO: 6803 - protein, 12 aa, synthetic construct
  REGION 1..12: note = Synthetic
TSWSSAIQSWYD

SEQ ID NO: 6804 - protein, 11 aa, synthetic construct
  REGION 1..11: note = Synthetic
CGSVDGVIKEV

SEQ ID NO: 6805 - protein, 12 aa, synthetic construct
  REGION 1..12: note = Synthetic
IAAVVDVIRELG

SEQ ID NO: 6806 - protein, 11 aa, synthetic construct
  REGION 1..11: note = Synthetic
LGEMVTRLPDG

SEQ ID NO: 6807 - protein, 11 aa, synthetic construct
  REGION 1..11: note = Synthetic
EAMENFMQQLK

SEQ ID NO: 6808 - protein, 11 aa, synthetic construct
  REGION 1..11: note = Synthetic
WNSLSSVFTEM

SEQ ID NO: 6809 - protein, 11 aa, synthetic construct
  REGION 1..11: note = Synthetic
AEPAADGVGAV

SEQ ID NO: 6810 - protein, 11 aa, synthetic construct
  REGION 1..11: note = Synthetic
AEPAADGVGAV

SEQ ID NO: 6811 - protein, 11 aa, synthetic construct
  REGION 1..11: note = Synthetic
AEPAADGVGAV

SEQ ID NO: 6812 - protein, 11 aa, synthetic construct
  REGION 1..11: note = Synthetic
AEPAADGVGAV

SEQ ID NO: 6813 - protein, 11 aa, synthetic construct
  REGION 1..11: note = Synthetic
AEPAADGVGAV

SEQ ID NO: 6814 - protein, 11 aa, synthetic construct
  REGION 1..11: note = Synthetic
AEPAADGVGAV

SEQ ID NO: 6815 - protein, 11 aa, synthetic construct
  REGION 1..11: note = Synthetic
AEPAADGVGAV

SEQ ID NO: 6816 - protein, 12 aa, synthetic construct
  REGION 1..12: note = Synthetic
GEWLGAWNNCFT

SEQ ID NO: 6817 - protein, 12 aa, synthetic construct
  REGION 1..12: note = Synthetic
QDCTKVYKDLLE

SEQ ID NO: 6818 - protein, 11 aa, synthetic construct
  REGION 1..11: note = Synthetic
FQSLKEFMDAC

SEQ ID NO: 6819 - protein, 11 aa, synthetic construct
  REGION 1..11: note = Synthetic
IDGGCAEGPGG

SEQ ID NO: 6820 - protein, 11 aa, synthetic construct
  REGION 1..11: note = Synthetic
ASEIGSDLFAG

SEQ ID NO: 6821 - protein, 12 aa, synthetic construct
  REGION 1..12: note = Synthetic
YQELFDQGCHPY

SEQ ID NO: 6822 - protein, 12 aa, synthetic construct
  REGION 1..12: note = Synthetic
CGSDYITYGNEC

SEQ ID NO: 6823 - protein, 12 aa, synthetic construct
  REGION 1..12: note = Synthetic
GLDDFLRQVERL

SEQ ID NO: 6824 - protein, 11 aa, synthetic construct
  REGION 1..11: note = Synthetic
GSDMSTYANEC

SEQ ID NO: 6825 - protein, 11 aa, synthetic construct
  REGION 1..11: note = Synthetic
AEPVAEGVGAV

SEQ ID NO: 6826 - protein, 12 aa, synthetic construct
  REGION 1..12: note = Synthetic
GSEADSVFSGFL

SEQ ID NO: 6827 - protein, 12 aa, synthetic construct
  REGION 1..12: note = Synthetic
TDYSDCIHEAIK

SEQ ID NO: 6828 - protein, 11 aa, synthetic construct
  REGION 1..11: note = Synthetic
LGEVNTYAGDL

SEQ ID NO: 6829 - protein, 12 aa, synthetic construct
  REGION 1..12: note = Synthetic
HLLKDLEEGIQT

SEQ ID NO: 6830 - protein, 12 aa, synthetic construct
  REGION 1..12: note = Synthetic
HLLKDLEEGIQT

SEQ ID NO: 6831 - protein, 11 aa, synthetic construct
  REGION 1..11: note = Synthetic
EMNTILDNLAA

SEQ ID NO: 6832 - protein, 11 aa, synthetic construct
  REGION 1..11: note = Synthetic
CDQAWGSMLEV

SEQ ID NO: 6833 - protein, 11 aa, synthetic construct
  REGION 1..11: note = Synthetic
DVCADMVGTFT

SEQ ID NO: 6834 - protein, 12 aa, synthetic construct
  REGION 1..12: note = Synthetic
SEITSLITTILD

SEQ ID NO: 6835 - protein, 12 aa, synthetic construct
  REGION 1..12: note = Synthetic
SDITSLITTILD

SEQ ID NO: 6836 - protein, 12 aa, synthetic construct
  REGION 1..12: note = Synthetic
KAVIDEIFQGLD

SEQ ID NO: 6837 - protein, 11 aa, synthetic construct
  REGION 1..11: note = Synthetic
EWVQKYVSDLE

SEQ ID NO: 6838 - protein, 11 aa, synthetic construct
  REGION 1..11: note = Synthetic
EWVQKYVSDLE

SEQ ID NO: 6839 - protein, 11 aa, synthetic construct
  REGION 1..11: note = Synthetic
DCDDIYAQGYQ

SEQ ID NO: 6840 - protein, 11 aa, synthetic construct
  REGION 1..11: note = Synthetic
VEDAGRVLEGI

SEQ ID NO: 6841 - protein, 12 aa, synthetic construct
  REGION 1..12: note = Synthetic
RVMESLEGLLES

SEQ ID NO: 6842 - protein, 12 aa, synthetic construct
  REGION 1..12: note = Synthetic
IDTYQEFISSWG

SEQ ID NO: 6843 - protein, 12 aa, synthetic construct
  REGION 1..12: note = Synthetic
FEECLEKFFSTG

SEQ ID NO: 6844 - protein, 12 aa, synthetic construct
  REGION 1..12: note = Synthetic
SLAGELDEAMGS

SEQ ID NO: 6845 - protein, 12 aa, synthetic construct
  REGION 1..12: note = Synthetic
SLAGELDEAMGS

SEQ ID NO: 6846 - protein, 12 aa, synthetic construct
  REGION 1..12: note = Synthetic
CPALVSELLDFF

SEQ ID NO: 6847 - protein, 12 aa, synthetic construct
  REGION 1..12: note = Synthetic
LKDLEEGIQTLM

SEQ ID NO: 6848 - protein, 12 aa, synthetic construct
  REGION 1..12: note = Synthetic
LKDLEEGIQTLM

SEQ ID NO: 6849 - protein, 12 aa, synthetic construct
  REGION 1..12: note = Synthetic
LKDLEEGIQTLM

SEQ ID NO: 6850 - protein, 11 aa, synthetic construct
  REGION 1..11: note = Synthetic
GTEIIENAVEF

SEQ ID NO: 6851 - protein, 12 aa, synthetic construct
  REGION 1..12: note = Synthetic
EALEDFEKAAGA

SEQ ID NO: 6852 - protein, 12 aa, synthetic construct
  REGION 1..12: note = Synthetic
EALEDFEKAAGA

SEQ ID NO: 6853 - protein, 11 aa, synthetic construct
  REGION 1..11: note = Synthetic
YNPLEQCCDDG

SEQ ID NO: 6854 - protein, 12 aa, synthetic construct
  REGION 1..12: note = Synthetic
EDLLQEAQALAE

SEQ ID NO: 6855 - protein, 11 aa, synthetic construct
  REGION 1..11: note = Synthetic
LTDYGDQLPEV

SEQ ID NO: 6856 - protein, 12 aa, synthetic construct
  REGION 1..12: note = Synthetic
GALWDECCDCVG

SEQ ID NO: 6857 - protein, 12 aa, synthetic construct
  REGION 1..12: note = Synthetic
MGDCIGWLEDFL

SEQ ID NO: 6858 - protein, 12 aa, synthetic construct
  REGION 1..12: note = Synthetic
GVDGYVDNIEDL

SEQ ID NO: 6859 - protein, 11 aa, synthetic construct
  REGION 1..11: note = Synthetic
MDGYVDSIEDL

SEQ ID NO: 6860 - protein, 12 aa, synthetic construct
  REGION 1..12: note = Synthetic
AWEAMEELVDEG

SEQ ID NO: 6861 - skipped

SEQ ID NO: 6862 - protein, 22 aa, synthetic construct
  REGION 1..22: note = Synthetic
  VARIANT 2..14: note = MISC_FEATURE - Xaa is a string of 10-13 amino acids each being any naturally occuring amino acid
  VARIANT 16..18: note = MISC_FEATURE - Xaa is a string of 2-3 amino acids each being any naturally occuring amino acid
  VARIANT 20..21: note = MISC_FEATURE - Xaa is a string of 2 amino acids each being any naturally occuring amino acid
CXXXXXXXXXXXXXGXXXCXXP

SEQ ID NO: 6863 - protein, 20 aa, synthetic construct
  REGION 1..20: note = Synthetic
CANTEIIVKLSDGRELCLDP

SEQ ID NO: 6864 - protein, 22 aa, synthetic construct
  REGION 1..22: note = Synthetic
  VARIANT 2..5: note = MISC_FEATURE - Xaa is a string of 4 amino acids each being any naturally occurring amino acid
  VARIANT 6..8: note = MISC_FEATURE - Xaa is a string of 3 amino acids each selected from A, F, I, L, V, W, Y
  VARIANT 9..10: note = MISC_FEATURE - Xaa is a string of 0-2 amino acid each being any naturally occurring amino acid
  VARIANT 12..14: note = MISC_FEATURE - Xaa is a string of 1-3 amino acid each being any naturally occurring amino acid
  VARIANT 17: note = MISC_FEATURE - Xaa is any amino acid selected from D, E, H, K, N, R, Q
  VARIANT 18: note = MISC_FEATURE - Xaa is any amino acid selected from A, F, I, L, V, W, Y
  VARIANT 20: note = MISC_FEATURE - Xaa is any amino acid selected from A, F, I, L, V, W, Y
CXXXXXXXXXKXXXGKXXCXDP

SEQ ID NO: 6865 - protein, 22 aa, synthetic construct
  REGION 1..22: note = Synthetic
  VARIANT 2..5: note = MISC_FEATURE - Xaa is a string of 4 amino acids each being any naturally occurring amino acid
  VARIANT 6..8: note = MISC_FEATURE - Xaa is a string of 3 amino acids each selected from A, F, I, L, V, W, Y
  VARIANT 9..10: note = MISC_FEATURE - Xaa is a string of 0-2 amino acids each being any naturally occurring amino acid
  VARIANT 12..14: note = MISC_FEATURE - Xaa is a string of 1-3 amino acids each being any naturally occurring amino acid
  VARIANT 17: note = MISC_FEATURE - Xaa is any amino acid selected from D, E, H, K, N, R, Q
  VARIANT 18: note = MISC_FEATURE - Xaa is any amino acid selected from A, F, I, L, V, W, Y
  VARIANT 20: note = MISC_FEATURE - Xaa is any amino acid selected from A, F, I, L, V, W, Y
CXXXXXXXXXRXXXGKXXCXNP

SEQ ID NO: 6866 - skipped

SEQ ID NO: 6867 - protein, 12 aa, synthetic construct
  REGION 1..12: note = Synthetic
DWMKTAGEWLKK

SEQ ID NO: 6868 - protein, 12 aa, synthetic construct
  REGION 1..12: note = Synthetic
AFRKIATVVKNL

SEQ ID NO: 6869 - protein, 12 aa, synthetic construct
  REGION 1..12: note = Synthetic
IEKVGQNIRDGI

SEQ ID NO: 6870 - protein, 12 aa, synthetic construct
  REGION 1..12: note = Synthetic
KTAGKRLKSLLN

SEQ ID NO: 6871 - protein, 12 aa, synthetic construct
  REGION 1..12: note = Synthetic
KVWDWIKSAAKK

SEQ ID NO: 6872 - protein, 12 aa, synthetic construct
  REGION 1..12: note = Synthetic
IGEEFKRIVQRI

SEQ ID NO: 6873 - protein, 12 aa, synthetic construct
  REGION 1..12: note = Synthetic
LDIFKDAAKQIL

SEQ ID NO: 6874 - protein, 12 aa, synthetic construct
  REGION 1..12: note = Synthetic
LDIFKDAAKQIL

SEQ ID NO: 6875 - protein, 12 aa, synthetic construct
  REGION 1..12: note = Synthetic
LWKTLLKNVGKA

SEQ ID NO: 6876 - protein, 12 aa, synthetic construct
  REGION 1..12: note = Synthetic
LERAGQRVRDAI

SEQ ID NO: 6877 - protein, 12 aa, synthetic construct
  REGION 1..12: note = Synthetic
ENFFKEIERAGQ

SEQ ID NO: 6878 - protein, 12 aa, synthetic construct
  REGION 1..12: note = Synthetic
QGLHEAIKLINN

SEQ ID NO: 6879 - protein, 12 aa, synthetic construct
  REGION 1..12: note = Synthetic
LLSSLSSVAKHV

SEQ ID NO: 6880 - protein, 12 aa, synthetic construct
  REGION 1..12: note = Synthetic
LDTLKNLAKTAG

SEQ ID NO: 6881 - protein, 12 aa, synthetic construct
  REGION 1..12: note = Synthetic
KKAAHVGKHVGK

SEQ ID NO: 6882 - protein, 12 aa, synthetic construct
  REGION 1..12: note = Synthetic
RIKKIVQKIMED

SEQ ID NO: 6883 - protein, 12 aa, synthetic construct
  REGION 1..12: note = Synthetic
LGKIIHHVGNFV

SEQ ID NO: 6884 - protein, 12 aa, synthetic construct
  REGION 1..12: note = Synthetic
QRVVEKFLKRAE